United States Patent Application Publication US 2008/0274467 A1 - sequence listing, part 10

SEQ ID NO: 1386 - DNA, 50782 bp, Homo sapiens
gagacaagggaagaaagagtcccttttctgtcggatgttggctctgactgagatgcctgaaatagctgtagaaagcaatagatgtgagaagaagatggagccaaaagaacagcagagaagtcagactgaagcagagccacgacgtgctgggttggagcctactctgcctgtgattttcttgtcatgtgtgatacatcccctttgacagcacagaagggatttgtcacacaagtacttaatgatgaagttgcatcaaatttgcaattttagttctagttccaactgcccatttcattttcccaccctttgggggcctttgtgttttgaaatccttggttgtcaggattcttttcttcttggaagttttctagtgatccaaactctctttttttcctgatttttgatggccataaacatgtctgattgatcaactaaactgcttcctttttccatggccttatgggtgtaaaatttatacggccaatgttatgcaatgtgtatgcagtgctggggatggagggctgctgactctgaaaaaccctttcctgggatgaccttagatgagaaaagaaggaaatggtgatgaaaagctttcaaaatgtaagggaatgtggcttggacctaaatggttagcacagactaggatattcttagaaaatgcctcccgcctctctgtagttgattttgaaatgtcagttcataactgccatacagtttggcacagggaaaattgcctaacacagcagtgggattgatgggtggagaagccctttcttttttcccacttgcccatactcttctctgcctaaagactgctgcttcctttttttttttttaaagtggatgtacaatttacaaacaataaaatgcacatatttcaagcagttaactaataaaaaaattatttttttccagaaaagaaaagcacaaatatgaagtttaccgtgtaaagagttgtgacaatggtatgctcccatgtaaccaacattccaattaagtggtagaatctttctcttatcccagaaaattccctcatgcttttttttccagttaattctctctttatcccagaagcaactcgagttctgatttctgccaccatagataagttcttgcctgttcttaaacttcacttgtacttgcgtatgacttctttctctcagcgtaatgttggaagattcatctgtgctgtcgcatggatcctgcttccctttcagactatttatgggatctgttgctctctgatttccctgactgccgactgtcgtgtttgaggaggaggccctgcccttcctggcaatggttttgctgtaagacgattttgccaagtgagtttcgtaagtcactggatcctaaagatcaagcaggtggctccttccagggacagccaattgatttttccattctacatgattatattgatgatgatggcgtcagaaccctttggaatgaggacagaatggcagttcctccagtggagggcccaggacaaatgttgagaatgcgaagcattctatgccaagataccactcatactttatcctgatggggacttggttccatggccaagactgaggagggaaacaaacatttattaagccccaaatgtttgcaggtacttggccataaatgacctaatttcctcttcctgagaactctttagatgttactgttcccatgtggaccacacttggcttcttcccaaggtgggagttgaacctggaattggggatttccataccatggtttttcactagcagcagccaagacctaggccactgtatccatctgagttgttgcatgcatatctccatgtggtggttaaacctcacaatcatgtccacaactggattgccacaaagtgagacttggagccagatacactccctttcttcctttctcaataagagccacctagagttgggagattggtcttcattttctaaaaatattctctttctccatagccaggcagctttgatctttggtaaaggtgggcagatctttgttatgccccctggaaatcactgttttgtaacagttatgtttacaactgagatggtttctaaaccctgagaagcataacaaagggcgatgccagcaaaaaggcattaagttctctaataggcttatgtcctgataatcatattaatggcactgtctcatgcttgatgctgccattatgggcctctcgtcttgaatataatttttcagtttgatgataattaagactatgattttgcatttctccttactgagaattctattcccaaaacaatatgatgaccgtaatagagacagctgttcatgcccctccaaattgttgaccataggtaccaccacaatgtcctatacacgctggactttactaacctgggaattttaagttctttcagcatcaggactctggaatatggagcaagtcccctgggaatcattacatttgtttctatatctgcatctgataatgaggctgtttttcaactgttacaaagtccaaagtcatagtaaccttcggagcaaaggacctgctttaagagccaggtgatttttaacctgtgatttaattgtccaacgttcaagatattatctctggtattaggtatttggcttccagaaagctacttttggggcctcatttgccagttccaagggattggagtagaattctaagaattccagtgccaagcttccacactttccatcaataattaatattttagccattgagagaggtggttgttgttttcataattccacttgggactgattaacagactaggaaacattgccatccttctgtgacaacctaagttggaggatatacaaagtttggggatttctgctgctgatgctatctgtgtgtgcctggcccttagacaggctgggaacttttctagatctgtgctgaaaggaggagggagatacagggctcaggcacccatctggccatggggtttgccaccgaggaagaaggctttcattctgaaccatgtccaaagggctgcaggagttggttccaacagaaccaagaaggtggaagccagctctgggcttatagatgtttgagttccagggtggcatctccatggggtctgtacctgaatggcaggttgttggggtgctcctggttagtgaggcagaggcagtaaagaacaaaggaggtgggtgtagaccagggctgtggctctgtgggcatgaaggtgtcctaggctggccaggtgaagtgaggcaaaccgcagaccttgaaggctgagaaggaggggcattcaggtctgcttgctcaaaagcttgcagtctggctgggcaaaaataccaggtggatgctggcaccaaaggggacacaggaaacttgctgaagatcagcccgtttcctcaccagaaaaatgggtgacaaggccggatgctgtggctcgtgcctgtaatcccagcactttgggaggccaaggcaggtggatcacttgagatcaggatttcgagaccagtgtggccatcaaggtgaaatgccatctctactaaaaatacaaaaattagctgggcgtggtggtgcatgcttgtaatcccagctacttgggaggctgaggtgggaggatcacttaaccctgggaggcagaggttgtagtgagttgagattgtaccactgtactccagcctggggaaaaaaaaaaaaagaagaagaaagagagagagagagaaagagaaaaagaaagaatgaaagaaagaaaaaaagaaaagaagaaggagtgacatggaaaagccagacatgagaggcccagggcaaagcacacaggattcactgtgtagtctgggctgcctgtccaccttggaggagcacatgagtgtgactgagaggtggcagggctacaggagtgacaacacgctgggaagcaggagtgccaagggagaaatctatgacctagaaactttttatagaccctcttcagactgtcagatcaacagtcttcacagccacaaagaaatgggcacattcacaaatgttctcaggataaatgagcagtctggatgccttccactccaccttctccaggaagcctcccagactttcccaaccctgactaattgttcccctacctgatcacttctcctccacgtcccataaatgctgttgttcctttggggagactgttgcccagccatagtgcctgtcccttgcctggtgctttttatcttctgctctcctggtcattccctcttgcccactctcttaaaactttagctcctggctccatggccttcacaccataactgccattcctcctcacatcctggatggctttcctgttcacacagaggacctatccagtgccctcttaatctcttgacctcatattctccaatgactttctcctctatgcctccccatcatgtcctggcattgtcatggccctaaacttctccacctcctgaactccttacttcagatccagatctctgacccaattcctctccttctggtgtgacttggtcttgactccttgacttttccagtcctttggctcctgtcctttctctctgatcattcaccgtgccacctcacctttgccaaagctctcaattcctttgctcctctgccctggtaatttcctcatttgagctggcaccacagtgggcagctgagctgttggaagaaaccacacaggagggccaaagcgcaccttaaaagttcacaggcaccagcctcaagtggactgccatgctgccttgctatctggctgtttctctggtcatcacgaccctcccaaactcctgcagtgactgtcataccttctccactctcttcaaatctgtcatctctccttgccctattgctagcctcctttatgtcacagagttaagaggaaatcatcaggtggaaagattcaactatctctgtgatggcagcctggctcagtcctcctccagcctccttcctcctgttataatacagaaggtggcccctgcctcagatcagcctttccacccacactctggtccatccctcccatgggcacaggagcctttgtgctccattgtcctttctctactgtaccttcatcttcctcttctctgtgggatcctccttatttgcatttaaatatactgaagtaattccatcctaaaaataattaaaatacataaaccaaaataaacccactgctgacataacattcccctccagctatttctctgacttttcacagttaaacctttcaagaattgtctgcaccttgtgcctttcatttcttcacctgttgctcatgcctccatccactccagtctattgcccatccccttcattccaccagccgctgctctgtaaaagtcccaacgacatcaaggtcactaactccagtggatgttattcaactttcacttcacttgggtcacttagcctttttttttttttttttttttttttttttgagatggagtcttgttctgttgcccaggctggagtgcagtggcctgatctcagttcactgcaagccccgcctcccgggttcatgccattcttctgcctcagcctcccgagtagctgggactacaggcacccaccgccacaccggctaattttttgtatttttagtagagatggggtttcaccgtgttagccaggatggtcttgatctcctgacctcgtgatctacccacctcagcttcccaaagtgctgggattacaggtgtgaaccactgctcctggccagccatttttaaaaaaagacatgggggtctcactatgttgcccaggctggcctcaaattgggctcaagctatcctcccacctcagtctcctgagtagctgacactacaggtgtgtgccactagacacatcttttgtcacccattttgagtgctgttgactactgcctcctgcttagagtgcttttgtccctggactctgtgacccccacctccccaaactcctagttttttctttttttttttttttttgagatagagtctcactctgtcgcccaggctggagtgcatggtgtgaactcggctcactttaacctccacctcctgggttcaagcgattctcttgtctcaacctcccaagtagctgggattacaggcgcctgccaccacgcccagctaatttttagtaaatatggggtttcaccatgttgtccaggctggtctcaaactcctgacctcaggtgatccacctgcctcggcctcccaaagtgctgggattacaggcgtgagccactgcacctggccaagctcctggttttcctcctgcctctctggctgctcttccacctcctctgccagaggtttgcctctgtctggcccttagataagagttcctcaaggctcagtggtaggtcctcttctgatctaattgtacactctcataggagcccacaagcctctggtgacttcattaccactgccacaccagctattccagccccagcctctcctcagagccccagaccctgcagccaaccacctgttcaacatctccacccggacatctcacaggcacctcaaacctactttgaccaaatttgaaccttgagagggttctccaactcagaaaatggcaccaccatccatctggttaaagaagcagagatctgggagttttccttgattcatcccccctaagcaattaccaagtctcgttggtgtctacctctctacatttgctctactgcttaaacaaatggcccctctcacattatagcaacagcctcctaactgtcgctccattccattcttcccctttccctattccttcttcacactgcagtcagagtgatctacttcaaaatgcaaaattgagtgtatgactcttgtttcaaatgtctcaggataaagtccaaactctgtaatgtggtgtactggccctgcgtgatctaacccctgcctgcctctctaacttcctcctcaaccacttcttcctttatagtctgaaccagccaggaactcctcatggactccccagatgatctcaccaccttgcactccctgtggcccatatcacaattgtaattaattaatagtgcatttaattgttaagcccctctctccagctagactgtgagctccaagcagggagtgtgtttgccatgttcaccactccagcgcctagtcctgtgctgcatctagaggatggccagtacatttttgttgaataagtgaataacacatctctgcctactgatgatggacctgggtcccaacctaacagtagggactatagccaagcgatgtggaatctagcattgagttactccccaaaagacacaaggtaactattgtagatatactcccaactgtgttaaagccaccatggagaaaatgcccttatttatttgagacggagtcttgctctgtcgcccaggctggagtgcagtggcacgatctcggctcagtgcaacctccacctcccgagttcaagcaattctcctgcctcagcctgccaagtagctgggactacaggtgtccaccaccacacctggctaatttttttgtattttttgtagagacggggttttaccatgttggccagggtggtcttgaactcctgacctcaagtgatccgcccaccttggcctcccaaggtactgggattacaggcatgagccaccgtgcctggcctaagaatacccttatttttaaatttcatggcctgggcagccttgggcagcgagggacacaagcttaatttcctagttggttgccagctgacattgtagcagctcctttactataaactccttggctggccgttcttgcaagcatgtctgtggctacagggagtgcatttaaagggaagacacatatgcatggaaacaatataccaatctgatggcacagaaaatcttccttagatgtccgctttgtctcaacactgcatttaaatatcagacagcagcctagagatatctttatttaaacccaggaacatggactcaatattattttgatacagaatgaagacatagacttcatttattaatttatactccctagagttctttttttttttttgagacagagtctcactctgtcacccaggctggagtacagtggcacgatttcggcttactgcaacctccgcctccctgagttcggcgattgtcctgcctcagcctcccaagtggctgggattacaggtacatgtcaccattaatttttgtatttttagtagaaacagggtttcaccatgttggccagacaggtctcgaactcctgaccttgtgatccacccgcctcggcctcccaaagtgctgggattacaggcgtgagccaccgcgcccggcctctacttcctagagttcttagagaatttctagcttctgtttctttaaacatgttttattagctttctaaattatgaaagtaaatacaactggaaaaatacaaaatccaaagtcaagggagtaaaaaaatgtaactcccttgtttcccctccccgcgtaaccgtggttaacagtcggtgtgcacccttacagatgttttttctatgaaaatacaaacattcgacttgtttcttggactttacctcgcagtccgaggagaatcatgtgaacagcatgaaagcagcatggtccgaagactgcaaaccataacatttccatatctactgactctgaattcctgtttctagaggacccgcacccacgtggctctgtgcatccgcagcaacttggtctttcttcctttgctgagtttggttaagggaaagggccgattattgagtgggctcagttcacaggtgcctgaaattcctacttagcaatgttcctttccagctgattccgcctccgagagccttaggaaaaaatgctaacagttaggagcgaagcgtccttaattgctcagtccaattatctagatgggtccaggttcggtttcgattcagagataaggaccagggggcggggacgcttccaggtgagcccctggttaggcttgcctccccgcggagcgcacgcgggtctcgctggctggactgggcctttcaagaccaggtaacttctccatccggtatcgccaggcttacctgggggcctcagaattgtgtcagctgcgtctctgagtcaccttggaacccctcgaaggagcgcggggctaggagggcgcatcggtgggcccggggaccccgctgctaggtgtggttggcgccaaggccgcctctggccggcggagccctgcagtgtccggagggtgcggtcagagtccggccctttaggccttgcctcggtatccgccttgccccttgggccgcggcacgggttcgggccgagcgcccggcatcttgcgtttctggcttcctgagacgggcgtgggacctcgaggaaaccactctgcatgaccccacgaagagaactaaggaccaccccccacccttcctgtcctggacggcttcataagccagaggatccagtggcagtaccaagcagggcaccactctgggtcgtgagcacctaagaggtggagcaaaggtcagaccccagggtggcccaggcctccctcccccgcctccccggcggggccattcctcacccgccccagcactggagggggcggccggggtcggtctagttccggttacaaactggacagaaaaggccactggagtctcgctaggcgatgcgcctagtcccctagcctcagacgaaccgcaagaggggccacccacaactggaggggcggaggctggagctgagtttcattagtgtttttggagctgccaggcatttccaggggggtcgccttcctagaggccccctttccccagcttaaccctcggctttgcaggagggtgcgtgggggctggagggtccctggaagccgcagggagcgcgggcccgggtgggtcctggtaccgggtggggagagcggaaccctcccaaaacttggggcgcggggcggggccgtcgggcggtgacgtgaggggcggggccgggccccattggcgggcgggcaggggaggggcggggccgggcgcccgcggcggctgctgcgcctggaaccggagcctggagtgaggcgcagcggcagcggcagcagcggcaacaagtgccggaggctagcagagccaagccggagcagtccctgccgccgacaccgccgggccgcccgtccggggcgccgcgcatggagcgtgagctgcggcggtcgccgggctgagccgcgcggagcggccgggacgtggatgtggccgcgatctcccgcccttgcccccgccccgccgagctggagctgctcccggacaaggtagggcccgggcgccgagcacccccgccggctccctccccgctgccctctcaccgccaggcccctctaccagtccccttccgcctccctgcttcccggccccaccttccggacaccctgctacccccgcccggttcctcgccggttccggcttcgtacccgcgccccggtggaggaagccgtccctaggtggctcctgccgcatttaagcctcccttaccttcccgccgtcccagccacccaacctcagcccagagggagaggagagggacaccgcccgctgcggggctttggaacctcccaacccattccgtgcccacctcgccctggagcccggggaccttccccctcctcgctgcaccccaacttccgggggatccggcgccggggcgatgcgggctttggcaaggggcatctggggccgggcctcctcatccggggcgcgcgggcatttcggggaggggggcgcgcgtgattcctcgctcgcacccccgcaccccaccctcgcactgcgccggcctcccgtgccgcatggggagatcaggtgttttgtgagccaaagagccgccggcagccgctccccaccccccacccccaacctctgccacttctgtctccggctcccccaaaactggtttctgccaaacttagggaaaacctttcgctttgaccttttaaaaaaaatattccacactgtttgcgttgaatgattaaccaggctgctagcccgagtcgtgggggtggggtggggcggggtggggtgggtgctgccaggccagggagcgcctgaagccggactctacgagacacccctcgtgggaaggtgggcgtggggggccctgccggggctgcgggcgcgggactggcggctactccagcacggcaggcggacccttctggaggcaataaaccgagtcacccggttaatttccaggccacggtatttgaaactcggggctggggagccgcagaactccctgtacccccatcaagtagaggagccgtcgggagactccccacaagtgtcacagcgtcaaagctcatctttaaaaatatgtacatttataacctgggttggcgaggcggcgctcttctgcccaaaacgtaggggtggttagtttgtagagtgggcttagctcacaggtgcctgagctgtatccccgtggccgcctcagccaccccaacttctcagaaagattgtttagaacaattaaactatattcttttgcccttctcttgttggaaccctaccgtaatatccgatagcgaagccagttggtgaatatagaattctacttgttaaaacaaattcttccggtataattatttgtgcctctggaggtggtaaacgaggtggccgacagggccgggactgggagtgaaaaggcggggaccctggccgagccagtcccggggctccggtgccggcttatagtcgcacccatgcggatctgacagctgacccggagggaggaccggcagggcagggcagggcggtcacttcccattgtcctaactcctgctcctggttcttttgagtagagggtggttaagcctggaggaatttgggagagttttactcggagcccatgcgctcttaaaccagattagattttaagaacacagaagtgaaggagccccatagggctgtacttgagtaatttgagtaatccttttcctccctgctcagactttacaaatgtgtttatcattagatcttctgtttgaaactacttttttagttcggaatattgctttttctccctacagcaagggttcactgtttctcatttagtttttgtgcaggcggcatttgtatgatgaaggcctaattctctgtgaaactgaccagttctcacccttgccattcattagacttgattctgccacatttaattcagtgatcttgggcaagttattcttcacctgagcctcattttacacatctggttttggggatggtggtgtttgctctgcaagattatttctgaggacaaataggatgtttgccaaactcctagcactgcaccaggagagctaagaagtgcttaataaatggtggtcattgctgtaatcaatagagaagttcctcctggcatcgacttccccttaccaaaaacagtaaccctgtggtagccttttagatttccctgtctgagactgaaatcagccacatttggcagatgcacatcagaaggttcttaaaacctaagtagtattttgaggaaaataagcatgatttgcttgttgttcaaaaattatgaatttttttctgggcttctggtgaagggctgaatatatgaaggtttgtagttttgaaaattttcttgttttaaagaaaagtcatgttttaggtttctgataaactaaagttgtgctaaaaataggaaagtagaactgataattcatagttgattttgactatactgttcagatatgtggttttttttaaaaaaaatagttgcattagtgaggcatcgttggtatgttctgaagagaaatatgcagggctttttcagctgatgcagggataaaagaaaaggtgaatcttctgtttctcaaactttgaaacttagctttaaatgtttttttcttttttttttgaaatggagtctcactctcccgcccaggctggagtgcagtggtgcaatctcagctcactgcaaccgctgcctcttggattcaagtgattctcctgcctcagcctccccagtagctgggattacaggcatccaccaccacgcctggctaatttttgtgtctttagtagagacagggtttcactgtgttggccaggctggtctcgaactcctgacctggtgatccacccgcctaggcctcccaaagtgctgggattacagacgtaagccaccgcgcctggccttagctttaaatgttttctagcaatgctagggtttcatgaaaatcctaatttagggatgctgatccacagctgttaatactcttgacatactgggtcagtgcttttcattctttctgacttggttaatggatgtagtatttgactgtatttttctgtatttttttgatggttttattggaaagtctgttagagactttaaaaattaataactgcctatggttacttttataaacattgagaccttgagatcttgcaactaggataatacttggtgatgtgtaatctattgcaacatccctgatggtggtacatacatcaccaatactgaaagattctcataaaggccttttggtctcttatgtaagtgcccaggggaaactaaagtcatttggttgcttggtatttttggtgtgtacagaaggttaaaacatgaattaaactagactctgaagtggtaaatgtttcctggctgcatccagtaaagaaaacagcacaaacacccaaaaggtgtggacccagctgtctttttctccactctctaaggtgggattgctgttcctacgtacttgccaaatatgtctgcaaattacagaatgaatacattcctctctctggagaggcaattactgtttgaataagaggtgtatgtatgtgtggggtaaggttttgggagaattgatgtaatgatttcatcatcactcactggtaaggagactttgccaggctggaacctgttacttgatggagaatttattattagggcttatgtggcacaattactttgctgctggaaaaagttatttgtactgagttttctatttgttacaaattttaagagttgagatttttgccctctgtgtgttgccctgtgagtattaacaacctctgcccaccagctttgtctttttgccttgtcttaatttttgtaacaaaaattcagatgtcttttgagagtcataacatgtatcttgtgcaattttagctttaggtattttcatatataactttaagaatgttacacattattttctgtgcatctataacttaaaaaaaacaaaaaccattttctgatgtggctacagagggggaaattcccagtagccaggaaattgatactttctacttttcattctgtggcattttaaaacagagggttcaggtgtcttcattctgatatgagtaggatgtacgtagcttaccagaatgtttgaaaaaaatgataatccaaggtaatcaattctggcatgtggctagattctgtccgagtgccatgtggtggtttagtggttaagagcataaacttggagtccataagatgaggatttttttaacttcatgtataacatgcagtaaagtgtgagaagtgttaatattaagcatgagctcatgtatgtaagctctcagattaagaaataaacattttcagtactgcagaaggttcctgcgcccatgtcttgtccgtgttcccaccccctcaccctgaaggaactgttattctttcttacatcatcatagatgtgacttctgtcatcatagatgggttttacctgttgaacttcatgtaagtggaatcagtcatacagtgtggcatgtagtcttttgtgaaataggcttgaattctatttttaccacttattgtgtgactacggacaagttatttaatctgagtctcagttacgtatgggaatgcctaaagttaaaattacacgaactatttcaggataaattttctcacttgtaaaatggggaagataaagccctatgttagatttactggggaaagtaatataaagctacacctagaatacctagcactgtgcctgactgcagtttcctcttcccctttttatttctttaacagggtgataactaaagcaactagatcttttgtgtttaaatgagctatttcattaaaagttctgtaggtcttttattgaaaattagaagacaaatctttatttaatactttgttgatatagctttagctttaagatgtattatttgttagttgcctgtttttgacatttcctctctaaagacagtcattgaaatgtcccattcagagttgtttggccacctgtgtaacatgagctaggatgcagtgatgagaactggtttatggtcaattatggagcttgtggaagagtttagtttgggtaagagtcatcaataagtgcccaagatgctcacaacatctgctttatgtttagtgaaataattatttcagaggtgaaagcacaggaccaattattttaattgcttgcttcagacaagccacttaaaacattttcagctcttgtaatcttaccgtgtaagcggtattacataattccatggcctcatgtctccttatttgtttggtacttttcatttttggactcattctgcaaatgtaacttgggtagtacttggcattctttctaaatgactttcattaaatgtttatttagaaaaagtattcaagataaagtaaaggaaaataaaactaattccaccctctctcaccactataactacattaacttgatgtgggtccttctaagtgctcatttcttcttttgtacacttctagaatgaccttaggaaaaacatacttccaatactttatggaaatttaaaacaaaatatgggcctgcttagagatgtctagcagagaaggcaagagtcttcgtaggcctaagttcaaatctgtccacactgtggtccctacttgtacctttgttagtgctgagcagacagtccccagagactccatcagagggtcccctggtctccagattacagtagccaacacggaaaacctgccctggaatacttctccattaagacctcaagatgtttggtgaagtgagcagtttgttctccgaccaaacacgcattgattgagcacttggtgtgtgcctagcactgtgcttggctgtgcgtgattgctgccttcagtgggcagtgtggtggagacagccaggaactggtaagattgccttggtagaggtgtaagccaattatgtgttggaggcagccaagaaaggcttcttaaggaagtggcctttgggcttggtcttgaaggatgtgaataacatttcagaggcagagaaaggaaggtagaagtgctcaagggattgtaggctgagaaaacaggacacaacagaaaggctcatagaggtcttttggggaaacagcaggtgatccattgggtttggagtgcatggtgcttagaaaggtgtaataggccatgatgcaatctcggggatcatgcagagatgtggcagttaatagttatggaggtagtgaggaaccagtgaaagttcttgtggtcaggggagagagagagagggtgtgggtgctgacaagttatggccaggcttgcattgaggaagatgggcctgagcgtgaatgaggcgagcctgaccccgggcaggtcattgcagtccctgcgttctctgcttcccatttgccccctaccagtttctctcagaaagaagctggagggatcctttaaaaactgaaatgacttgaggttacttttctactcagaatcctccagtcagaatccctgtcttcttcagaggaaagccagagttcaaatgtcacctaccaggactggtgatctgccctcctcctcctacctcccttctccccctcatttcactccaggcacgaggcccccagctttcctgcctctggcctttgtggtgactgctccccctgcctggaactatcctcacctcttctctgagaagaggttttctctgatcacccggcataaagcagcctttccttatcccctgtgcagtgcttcatatttcatctaagtgtttatcaaccttacagcagtcaactctgacttggttctttgctgcctgttttcaacactgcttggtttaagtaggcgtttgacatttgttgagttaggccacttcattaaagttagtcttagtagaggggaaactgagggctcaaaccagggcagggatagtacaagattgaaatatgtatgtgtgttgtttggaagaggtgggtgagagaaagactcctggtgggtgtaaaggaatttggaaaccaactaagggaggttaggagaagggccatgacacaggtatattggggcattttttagcatatgggatatgggagtctgtagtgatgtctaggggacaagaatagggggtaagggaagacccagcaatagacttgggcccagaactgtggagcaagtccattttgtgggatggggccaaggagcaaaggctgccaacatgcaagagaaccctgggggttcctgagcttggggtggggtagacatggtggccagcagtattgggtgccctagaaagtcaggagggtgcaaggactgcgaagattctagaaggtgagggggattgggagggtcaaggcaggacaaatgggcatgacaaggagcatgtgcctggtgcctttggagagggagaggctgaagatgggggaaacagtggagattgctattggtgcaagaccccagaagcagcaagagctgtcacagggagtggagatcctgggagttgggggtcagggactggctgatgtagagaacttgaagtaggttttggtcccagagctgacatcaaatgtctttgtagctatggcaacccacttagctcctgtttcccacctccctgcagaatcgcatgaaacctgcacagccaatttcacatgtttattattggaatccattgaactcatgaatatgaaagtgttaatgctctgggaagatatttctatggaccataaacttgctgcagtttatttgtgcttcagaattttttttgagacagaatttccctcttgttgcccaggccggagcgcaatggcatgaccttggctcactgcaacctctttctcctgggttcaagcaattctcctgcctcagtctcctgagtagctgggattacaggcatgcaccaccatgcctggctaattttgtatttctagtagagacagggtttctccgtgctggtcaggctggtctcgaactcccaaccttaggtgatccacctgccttggcctcccaaagtgcctggtagaaattttctaattgtttattttctttgagaagcacttaacatccaactggttctccaaagtacttcttttttgagtcttgatcagggaataacacaattgtggtgagttttatgtgcatgtgtgtttttaaccctccaggtctggctctagattgttcactgggaagccgaatgatattttcagattcaaatatatttgtctaataatgaaagggtcgaagtgttacaaatgctatcctttctaaatagtcaacatttggaactagtgagatatatttttacctttattattttatggttgtctttgaagcttgtttataaggaacttttatgtaactttattcttgagatgcagccattatatttttgttcttttcctttaccacataaggaattatttccttcaaatgaacttaaaatatctctcatgaatactcctatttttaactgaatgtttctcttttttaaaaaacttttattcttcaaagttctgatggatcgtctttttttaactctttataatggaaattttcaaacaagtgcagatacagagaatggtatcatgaagcttcaggtagccaccagcggcttcagggtgatgattctttattttcatctctaccccactcacgactaggggcccatgggcaccatctagagagggagagagaagaaggtcacaatggaccacagagtgagcagccatcaatttagagatagcggaggctgggggagaagattggacgcccccagggagagtgacaggcagaccggcgagattggaagcccgtggcactgggattgctgtggtccctcgtccctccacatatgtgatcacctatggtatatgaagggaacgtgcagagactcgtttaaaactgaggtgactcaaattgcttggtaaaagaggcccagtttttaagcagttcaatagtgcccacatattgagcaaacatgttctctttttactgtggcgacaaaaacttttcttggcgggtggccggagaaagctatgttactattgcacttctttaaatacggaagcaagtcttggtcgaaggcctgaatgatgcctccccttttatagaacatttggataaaaggccaaagtgttacttttttttgaggatacgtattttaaaatgtatatggtttattttgatacttaaaaagcaacaacttgaaaacaacagtcctgaaacacttgtcagtaaggtgttaggatttaaccagcctttgagaaagggagaagaggcgggacaggaatccgagatggagcagggagctggtttgcttctttgccgccttgctctgaagttgccacccagggtcacacatcactagaagtgttttcctctgggaggaggatgatgtctgactgtggagaagaggcagcatcccagagggagcccaatttaactggatgctcagtgtgagaggaggagcgctggcatttagtggctgtgtgccgtgggcggggcctgccagcccttggctgtcatttgccacctgagggacaggctgcttagttccagcctcctggctcacctggaaccatttctcctgggaagcatggtagccaggagagtggattccaggtggtgagggcttggtactccttttgggggatcctgagtgccaggagaagaggatgaaatcgatggactgggggaatcaaggctgtcctcatggaagaggagacaggatttgaacctgggccttcaaggatgggggtaaggatggagagaagcaagataagggatgttttaagccaggagaaaccaggctgagaagaggtatgggtggggaggatagtagttgttgttaaggggtgctggtgtctagaggcctccgggatggggttttaggggtggcctgcctggatcaaggatcagcttggacgtgctcagcgaggatggggatgcccatttccctccatgcagctctgggctgggggcggcccatctgggttctcagttcctgccctctccctctactttttctgggaacatcagacaactttctgatcctgtgaaccagtttacttctctgtgaaatgaagacacctcagtcaccacttgactgtgtatccaattgcgcccatggcatatggacaagccctcactcagctaatgggtgggcactaggtgtgcagtggttaatttgttttattataaggagtgtccttgatacctttatctcatttctctattttttttcccttccccaaagtgttagaccatgcactttaatccaacattatttttatatgttttttattcttgtagagacaggatctctctctgttgcccaggctggcctcgagtgatcctctcacttccacctcccaaagcactgggattacaggtgtaagccactgtgcctggcctagtacaacattatttaaaaatctctacacatgtctactctgcagaactttctgcactctttgtgcctgcttttggaagagcgagtcaggcagttctctccaagctgctaccctacaagactccaaatggataagccaaggagtcctgcagtctgaggttgtagtacctcactttctggtgtccccttcgctgtaaccaagagcatattctcttttaagaaaatgtgtcactggaaaccttcatcctaactaccaagaaattgagacttcccaaagcaatttattaaattacttaaaatacaatgtcatttgtataattgtgaacacttattgaagttacagaaggttatttttaatatgctatatgtaatctcaagttgcagcatgttcaatgcttttttgattttgaggttacatttttattttggaaggaagacaaatgtaaacgtttatcttgcagggaaatgttggggatgctctcaaactctacagttttgtttttttttttaagacagggtctcactctgtcgctcaggttggagtgccgtggcacgatctgggtacaccgcaacctctgcttcctgggttcaagcgattcttctgtctcagcctcacgagtagttgggacaacacacatgctacaggccaccatgcccagctaatttttgtattttttgcagagacggggtttcatcatttggttagacttacggttcttgagggacaagaattgccaagtataatttaatagaattggaaaggcagtggttgttttgaaagagtttgtctgtagagtacctgatggaagtgaggtacatccgtggtccccagcctttttagcactggggactggttttgtgaaagacagttttccacggactccagggtgggaggatatgcgagatggtttcgggatgaaactgtctcaccctagatcatcaggcgtcagattctcgtaaggagcatgcaacctagatccttgcatgcgcagttcacaaagggttcgccctcctgtgagaatctaatgtcaagctgatctgacaggaggcagagctcaggcagtaatgcttgcaggcctgcccaccactgctcaccaccagctgtgtggccccgttcctaacagaccatggaccgctaggggtccatggcctggggtttggggacccctgccatagattattcttgcctgggaaaataatggattgaatttgattgcctgagtgcttaatattaaagtgcttgttttaaaatttgaaatttctgcttctctgtgtgtggccagttatcacaccagtggaactaagtggtggggaatggtgtacttttgaaagtcgatcttatgagtttgagaggggtcatctttaaattttgtaaattggtcattagttgaattcttgtacattttactatgtaaaatgacagtaatcactttttcgtacctatgtgaaaatagtctccttgtttgtatgtgtctgtagacatgaggagcccacataacagacaacagattcctccttccttccccccttcctttcccccttccttcccccccaatctctacaccaagactgccaagactgggctgatggcctacttatttccagaagcacttgtacaaggtcacttggataacagtttatataatgggattctgtttctagtccagtaaatgtaatttatgcttgtgcgtttctattaatttttaattgccttctttctcacctcccccatccctgaggcctgtgtttgtttatagatttatttaattgtatttgtttcctgagtcatgtttttaggtgatgtactgccttgagatgacaccacgtaattgtgtcttgaggagtgaggcctagaggggaaagctcgggaattggtagatgcttaggatacttatggagaagagggccaggactggcacagagccagggaccagagggagggatgctggggaggggggtgtgtgtgaaattatccaagaatggtttgctagaacagtgtttaaaatgtttgatcaaaatggtcaaagaatacaaaatgtccttagattaggtcctggttcctttactgtccctccccttcttgttctcatattgattgtgtgttgagtggtaggcactagagatgcagaagtgaatatggcccattctgcccaggagtccttggtgtgtcagacctgttatcacaccgtgtgctaagtcagataaatgtgggtgaggtggtggtaacagcaagggggaagaaatacaagcagcccaacctgggtgggggcagtggggtgggaggaagaggtgacacattggcgcttttttggttgttgttgttgcagtctcactcttgcccaggctgggtcggagtgcagtggtacatttcagctcactgcagcctctgcctcccgggttcaagcgcctcagccttcctagtagctgggattacagacatgagccaccatacccggctaatttcgggccattggctcttctgtttttatgttgatagcccagaatggaagctatagactgtgagaaaaagactttgttactaatgataattttgactactggactggactccccagtcccctgggacacgtggtagtaatcctggttctcttccccagggcagccttgggcaaggctctgtctccctgtgccttggtctcctctgctgtaaaagagatattagagtggatggtctgtaaggccctgggaaagaaattcttggagcttctttctggtaatgaaattgggtcacaatctatgtatgaattcatgtgcatgttgttgaaaaacaagtaaaagaatgaggtaagccaggcgtggtggcacacttgtagtcccagctacaagctggtggctgaggtgagaggatcacttgagcccaggaattcaagaccagatggggcaacacagaacacaggccagaccctttacccgcccccacgccgtcaccccccacacacaccaagagtgagatggtacagttggtgggtaacgctggttctttgatccctttccttcacaggagagctggggtctggaccagccctgtgccactgtcccaaccctgtggcaggttgtaaagttgtgctgatctcccttcactgcaggctgtgatgttggagggaaggaaaagcagattttctccacctgtagccagctctgacaggtgtttaagacgaggctagtttaagccccagcagtctctcatcctttcgtatgaataatcaaaactgagtcatcacaaaacatatctgcaggggattctgcctatggtgcggaagtgttaccagaccaggacccctggatacgttaaaccattgggtgattcccgactggccattttgttgtctacattattactttctcatatcaatttggaaagaaaaaaaaattcgattccccctgcctttccttggaatggtttacatcttcctggatgggtatccacaaatgcaataattttggtaccttaattttttagaactacaactttatttggggattctcaatcctcctcgagcaacggtattgtgtggtagaaagtataagagcttagacccaaggttgggaccagagtccaaacactgactccactgggattagctctgtgacctcaaactaattgcctcacattttttagtttgttgtggagattaaatgagatgagaacatcccaacattaaaaatgggcaaagggcatgggggagtaggaagaccaggaaggaagcatatgaaaagatggcatcaattaaaacagggagatgttcttttttggtaaagattaaaaaggaggacagtggccgggtgcggtggctcagacctgtaatcccagcactttgggaggctgaagtgggcagatcacttgaggtcaggagttcgagaccatcctggctaatatagcgaaaccccatctctactaaataatacaaaaattagctgggtgtggtggtgggcgcctacagtcccagctacttgggaggcagaggtaggagaatcacttgaacccgggaggcaggggttgcagtgagccgagatcgcaccactgactccagcctggatgacagagcaagactccatctcaaaaaaaataataataataataggagtacagtattcactgtcagtgtggatgacttcatgctcttgggtatacaacgagaggataaatcagtgtgacctttctttttggtgggaggttaagggtgagagtgaggggaatagcttgattctatgctaactgactttaaaaggttgggttcccttcgtaatatgtttcctccggaagtaaccagatgatgatgtgtctaggagggtgtttatgtgttttcagttataggaaaaatcagaaacaactcataagctcattgattagcaattgataaagcagttgggtggggtggctcgtgcctgtaatcccagcactttgggaggctgaggcaggtggatcatttgaggccaggagtttgagaccagcctaggcgacatggcaaaaccctgtctccacaaaaaataccaaaattagccaggtgtggtgacatgcctgtagtcccagctactcaggatgctgaagtgtgggggcatcgattgaacccaggaggttgaggctgcagtgagctgtgattgcgccactgcacttcaacctgggtgacagagtaagaccctgtcccccccgtcccccccaaaaaaatttgataaggcagaccacatttacctatattctggcaggggagttagagatccgacagaagacaaaccactcttcccctgtgaactgaatctgctttagagaaattaagtcttcgggacaacaaaaccaactaaagttgtaatcaatgggcatccaacttggagttcttcgttttttcccttatttcatgttcctatgtgatgtggtcagttttctgttttaagtagaggggacaggaaagaaaacacattcctccagtccatccagcagcagcatttgtgaagcagccacagcttcacatactttcttcctagcagccctgggccccaccagctcctccctgcccttctagtgtggcctcagaagctgtctgtccatgaactggctgtgtccatctctgcctgcagacgctctgtgccgtaccccatgtcttgcctgccctgcttctctctacatttctgaaatttgccctgttggaagccccactaaggtcctgccttgacccctgctgttgactaaagggctgtcacgtatttattatctctgccaattcagtgtataggacccatgttttatacccgcttttccccaaaccccagacttaaataaaaatgttcgttgttagaaatgactctgggttggtgatgtagagatctataacttgtgccagtttttaagtattgccttcctgctccaaattcaccctcagttgcctgatctctgaaaatgggtctgggccctttaaatgttttttctttgccttttgtaagtagagggctctgaaggggaccttgtaggaggaagggatttttcttcctgatttcatatgtgtgcatgcgcatgcttttcctgcactcctatattcctgcagggcacacctttctccagcatctgttgctctgttttctgcagctctggcatcggtggtaccaggagcctaagactgggtggtccttatccaacccagatcattgcttcctacagcctctcagcccccatgtgtgtaccccaagcccccctggtgctggccatctggtgagctagccacctgatctttgtcctcagcacaaccctaagctgctctggcctagggtatacattgacgtggtaagctcctatggagggaggcctcttcactctggtccagcagcacctgatgactccctgtgtgtgcccctccttccttctgtctgcttgactgtctacacccagacttgcttgcctgtaccctagagggttgcccctgctgcttggtgactgtgggggatctctggcctaggtacccaggagtttttctgccatctatactttcttcaacaaactcagaaaaaacccctgccctaccaaattttgggagatatttttcatctgttccagggcatcctttagattgttatttcatctttatagtttactcaagtgtcatatttattgtattaaacttccctttcttagattactgtttggtttctacctgctggttgaacccagactgaaaaacattctatgcagctcacctaagcaggcagaaggatgaatcagagagaagtctttagagatttctgagggctcactgagagcctgccagagtacacttgcttgtacacaggtcctagaggttggagtggaagcatttaccaagccacgtacaagctcttaaccaagggcttccaatatgcattaagctccccaaaaagggactgcttgcattccggtgttttttttctaaaatgactgtcagctggggcaacatgaggagacctcgtctctacaaaaaaatttaaaaaattagttgggtgtggtggcacatcccagctgctcgagaggctgaggtggaaggatcgcttgggcctgggaggttgaggctgcagtgatcaggcaactgtagtctagcctgggcgacagcggagaccctgtctcaaaaacaaaaaatgattgtcccaccttaggtaagtagatgcccccaggttgcaaatctgtactaaggatcttcctctagatatgcttcccatgactgtcatggccttgtaggttacaattgctggaggtccatccctctccagaaaggaggtagagatgccccattttgggataagggtgcaggagggataatgggtctgctgcggaagaagatggcaccctcacctggaagcactgctcaatcccacacacctgcacacccatgagtctgctgcctttggtggtctggggctgactgtgggaaatgagggggcggctgtacttctcaccccagtttacctcttcagatcttgcccccaccctcacgtctaacatggagtcagcactgctgaaattcttatctcccctaagtctagcaagttatttaaatttttctgttaccctttagttcttaataagtgagacagttttctataaacatgtctgtaattcagcacacatgtgatttttccattgtcatctcttaggagaaagggtgtatatatatatataatctggtttctactgaacactgtgttcagtaaacttgtccagatgaccaaagtatctgttcctttagcaaatgctgggtaagtctcaggtaccacgtgctggagtgtaatggtggtgcagtgtgaagaccttgactgcggagggttcccaggcagaggcatcctgatcaggagcagataccctgactcctgggcaatgaggctggtgtttaggctggggcatacccttgggcaggaaatctctaagagaaagaagtgatgaaaccctgagttcaacctctgggaatggagaagaaaggagttctagaaaacaacagacacatagctagagttaggctctgagggaacagtagcatattggtggtggtctgggggaactgtgggaacagcatgagcagggagggtgtgtccaggggactgaagacttgggaaataagacatatttgggaacatagtgggaaaggaggctgtaggctattgcaggctctggaatagaggagagatgaggagggagctaccagtggcgtaatagaagcacctggctcctggctgaatgcgcagagcaggaagcaactcaaggtaatgtggggttttcaccaggtgcctgagaacttgatccattgcacacagaggcccgaggaagagggactctgcaaggcatgtggaagctaatatctggagttagtttgttgacccatgaaccctccttttggaggtgatgctcatggcattgaatggaggagtttgtagagagaagactactaaagaggcagtgaaggacggaactttgagaaatgtgcttcgtttagggtttggtggaaaaggcagacccctgaagagctattggaggttgtatcatcccattttacaaaggaggaaagtgaggcttagagaggtcgggtaacttgcctaaggtcacacagccagtaggtagcataaccagaatttaatcctggtcctgtcactccagatgccaaactggttttccagtctgaaaatggatctgggacatctccatcctcaaacgtctgctacccttatttttaaattgcataatctttccacctagacctaaaaccctctttagtttactaaaggcagggcagaatggcctctgggagggttaattcccttctcctcttttcctcaaaggttctgtatgtgtttatttgaagaatacttctagtggctaatttgatttgaaatgatgaatatcatttgagaaaatcggccacactgggctttcggggggttgtaatcagtgggggccagaatatgtcctgccagatgctttgatctataatgttgcctgtgggactgtgtaggtgagtagattcattataaatacgtttcccttttaatttgaacatgaaggctaaaagtaatggctgggaaccaaattccttaaatctagctgacaatagttctgtgacttacagactggagagcagaggtagaccatcatcttagctgagtgccagcctcttggtgagggagtccagggagtcctgaggctcccttgccccggtgaaaacccaggccaggcctctttccgcaatcaaggaacaagctgtaggtgtggcccagctcttctggtcccactgagctgctccactcacacccttatcactccaccatctgccagcagtgctgggagctattctctcccctagagccatttagctgcaaactgtctctgtctctgtttatccgagcagaacctggaaggggctggcaaggactaggcaacagatgggacagccagagaggtgaggacttaggtaaaccactcttgccagactcccggaggtggtggggagggaaagggcagagtgaacgtgctcctctggcctcgtgatatggcagggggcttgggctctttctgaggatttgtgtgtcctgttggagcaggaaagtgaacaggaaccaggatgccctctagagatggaggctgctagctctgacactcctggggtttagtcagaagcttggatttccagcccctttctctcagcctgagtgggtgggggtgactggtcattttatttcacggttacaaggaggccttgcttttctttcatccttaatcttggtagtaggagaaagtgcagggcagccttggcacaggtcttgggtctggcttgtacgtattgctcgttctgtccctggctagttactgtcgggcatctttttagcttgcctgagcccatggcgggggagtcagaccctgcctgagttctgggagagagtcctcatggctgttggtggccacattcaaatgttttctggccagcagttttgcttcagtgctacagggctctcagaattgaagggaacctttttagggtcattgggttcagggattcccagtctagtgtccatgagtgaaacgttggaattgtttcagtatttgagtcctaaggaaaacagcctgtgtgggctaagtaggtattgaagacctttgctttggtcagagtgaaaccagctgaaggtcatctcatgtggatgggtgggagggaggcctgggggaggagggatcatagcttctgatttttctttttttttgttttttttaaagagatagggtctcactctgtcactcagcctggagtacggtggtacaatctcagctcactgctgcctggatcttctgggttcaagcagccctcccacctcagcctcctgagtggctgggaccacaggtgcatgccactacacccagctaatttttttttaatgtagacatggggtctcgctatgttgcccaggttggtctcgaactcctgggctcaagcaatcctctcaccctggcttcctaaagtgttggggttacaggcgtgagccatggcacccagcccatagcttccgattaatagaacggtgggacagtaggaaaatgggcgcccttgaaaaccatggttttgcatgggagaaaaaaaaattaaaaacagcctcttagctaagaaactaaggtcttgagaaattggcttccccggggtcataaagtccacgtgagtcactgtctgttttcacagcttggtaatctttcccatgttccagtacaatgtgtagaagaaactagaactagaaggcctgggcgcaagccctgactccatcacttgctggctgggaacctgggactctcaaagcctcattttttctcattttcttttaggggagagatgagtgggggctgcattttgcccagagcctagcctgtagagtcactaatgttacttaagatagtacactgcctcccatatctgatggttgactcgtagttttgtgggtgaaaatgtataaatacagagcttttaaaaagttactttaagaagattaaccatggaaaattagacacaaatcccttcagttcctgcggtcataaccatacgcagcagcgtttgcttccgtgattgtgtgatggttgaaaactcgcactctggagctatcattgcctgggtttgagtcctggctctaccatttaccagctgtgtgacattggacaagttcagtcacttgtccacccaccccgtgccccctaccctgtgcctcagcgaaataagcagtgggaatttagagtatctgcctcaaaggattgctggtgcttggtacatatttgttaaggcaggtgtgttcatgtttcactattacatgtaggagcccttaggacgtggcacaggcacaagggaaggtgtgcaggtaatagggatgggtgttgtgacagcctctatgcagcactgtaggggtcgaatacggcgatgctgacacaggctgggggtgggctgtggaacagggaaccccgcatggggctgtgtgctgtatcccggtccccagcgtgcggcggaagaggctgcttacagggcagacctttgggcagcgttaaaggatgtgaaaacaccctctcatcccaccaccctgaataaacccactttgtttttgtgtagtattttatctagattgtcacatagtttcagcatcatgtctactgttttgtaagccatttttcagctaaggttttctctgttatactgtctttctaaatattttcatttcattaaacaaaaccaactgaagtttcaaaactgttctgtccctgttggggacaaggtaaaaagctaaggttgctttgtgtttgtatatggggttttctcttatttctgttacaacagaaagtctgtgtttcacagcgagagtttataacatcttcccccagctttggggtgagttttcttaaattcttcttacgcaatgtaacttcctgctgaagaaaggacattggaattgggttttctgtctgcgatgggaatgtttagtcagatatttagagagctttttcccacagatatttttatgggggtcactgctttatcctcctttccatgaacttggctttgttctaagagcctactagaagccgagttctcatgcaagacactgtgcccaggtcacaagtgcacgatgacatttaaccttgatggaaatgtgcagttgagaatcttgttttctccaccttcctcttcagattggcttgaaagaaataccctttagcaagtaatgggaagagttgcctcaaattgagcctttgggaatctgaagtcttttacaagaaaggctgatctgtttcctgaggtggggctgggagcttgtaggtgcccccatttctctttctttggagcctctttaactatcaatgtaccatgatcccgtgccataatcagcctgtgggacttcactgttgacctggtccaggtaactagaatgtggttgagcctcatagaaaaaagagatccagagagtcctggattgggagccagaaggtggtcttgtctaagccttgtcacgtaactcttccataatattcaggcaaatcatcagtcccctctgagcttccattttctcctggtaaagtggcatcccgtgcaatgagaaatgagcaggaaaatgccctgcgggctggaggccttgagcacttaaatgaaagttgagggtggtgttcccgggaaggccattcattagtccctgtgtcttgagccaaggtgatgtgagaactgtaccttgacgtggccttgattgaggaaataaaaggctgaattgtagcagatgaagttggaaatcttgccaggggtcagcaagcttattcctcaaagcatcctcaaaagaaggattggtgttttccgtgatagaggcttcaagtggttatggctggattccagttattcatggcctctcccataatctagatgtataaacttgttaaattatctggagtcatttttacatgttattcactctgtatctttcctaggagaattagctctggaagttcacagcctcctatgtaaagtactgtgcttcccttttttcttccctaagctgtcctcttttactccagaaattttggtaaaggtctattaatgtttaaatccctttactgagttaaatttttgccaggtattaagctgttcatagtatgtgctgttttttcctgagtagttttgctctgtcacccaggctggagtgcagtggcacgatctcagctcactgcaacctcagcctcccaagtagcttggactacaggagtgcaccaccatgccttttttgtatttttagtagaggcagggttttgctgtgttggccaggctggtctcaaactcctggcctcaagtgatctgcccacctcggcctaccaaagcaaagtgctgggtttacaggcgtgagtcactctgcctggcccctttgcaaatctttttcttcattgtagtttttcaccatcacacatttcctgttgcccttccttccagactaggaagggcctgagacctagagacagcagtactgggtcaagggctcactttagcattaggagaattgtcccaagttagagagaaccttttctttttgagaagtatttgagaaataactggagttatcacggaagtctccaaaggtatgaggttaggtttttcaagagtagttttgtgggcaggggaccagggagtgggtgctgctgattggctgtggatgcaatcaaagccatgtgctgagtctgcaggggttggggggagtcatgagtctctagtctgggtggggtaagtctgagaaacattcagaagaccaatcttagtttctataatagtggtgttaactacaggagcacttggggaagtcaaagatcttgtggcctctggccacatgacttctgagcaatacgggattataaaaactgtgcttacattttagcagaattcaggcccctctcaatcctaatcttgtgacctttcattagcctcagccccctgaacaaggaagggatcagttttatggagggactgttaccatctttgcttcgaagttaaactgtaaactaaatttctcccgtggttagcttggcctatgcccaggaatgagtggagacagctagcctgtgagggtagacgcaagatggagtcagccatgctagatttcttactgtccataatctttgcaaaggtggtttcagcagtagtaaatacaagcaaccagataaaggtctactaggcagatctttacagacacacaatagcttgtgaattcctgttgatctcatctgggctctctaatatgtaatagttttacagcattctcagcatgacaaatatttttctactttaccgtttgttagaatccagtgaacttaaaaatcctctcctttcaaaaagcaaatactagattaaaatagttgcaaagctttcttttagggattggagaagtgtagctaccttttggcatggtacagacttggaatctgtttgccttggctggtattccagtctgcccttctttaaatgtgtacctcctcaggtataaaatgggaatgagtaatagtacctaaggataaattcccagttgaattaacctgataagaaaatcttcagctctttatagaacattgccatcccacttttttgggctatcttttaatgtcaccttggtttaaatgttcattcttgtataggtcatccatgtcaatagtgttagaaccttggatatccccagcaaaccatctcattactcattctttattcttccattgcccacagcctgaaatcttttgatatttcactaaaatatcatttgtatttccctttttgctacaaacaatagagatcttaaatatacacttcaggtttgacatatgcatacatccgtggagccttcatcaggatcaagacctacatggtacatttctgtaccccaggaagttccttcctatccttctctaagcccaccacctccatcactttcagatttctagaacctaaattcattttgcctgttcttgaagttaatataaatgaaaatttgggtctggccttcattcacaatgtaatgttgtaatgtttcatccacaatagtttccctttctattgccgaggggatataccattgtatgcagatgccacagtttgatcatctgttctgttgatattgggctgttgccagttcttggctattgggataaagctgtcctgagtctgctttcattttctctgtctgagatgctctgtggttcctgtctcctgcttcctagccctgcaaccttgggcaagtgtcttaatctctctgctttggtttccttatctgtaaaatggtaggttggaaaataactcagggttgggactaacattaaaaaaaagagagagagatagggtcagacatgcctataatcccagcactttgggaggctgaggtgggaggatcaccttaggttgggagtttgagcccagcctgagcaacgtaaccagtccctgtttctacattttaaaatctcaaagtttttcaaatgaaatagaagagaacttgagagtgaatgacatggaactgcacacaatgcgtcacacatgtaaatagagttttgtgtatgtatgtgtatactaaacacagtataaaaatgtatttgttataatttaggcaaatcggtttgccaagcactgtatgtgccattgtaagcaaggaagttgaactctcctgaggttatttagtaataggtatttctagcttcagcatgtctcaaacagtcacttacatagtgcttgctgtgagccacgcgctattttaaaagctttccatataacatcatatactcacaaccatcctttgaagtgggcttgattcccattttatatatggagaagttgagacagggactatcccacttgcccatgatcacaaagctagaaaggaagggccaagatttgaacctaggcagtgcaagtgtagagtctttgctgtaaaccactattcctggggagacaggtaaaataaattgtatgtgcaaatgcaaattgataagtaattgatacaatactccacccctttattccagatatgagaaatgagtgttggacgtcgaagaataaagttgttgggtatcctgatgatggcaaatgtcttcatttattttattatggaagtctccaaaagcagtagccaagaaaaaaatggaaaaggggaagtaataatacccaaagagaagttctggaagatatctacccctcccgaggcatactggaaccgagagcaagagaagctgaaccggcagtacaaccccatcctgagcatgctgaccaaccagacgggggaggcgggcaggctctccaatataagccatctgaactactgcgaacctgacctgagggtcacgtcggtggttacgggttttaacaacttgccggacagatttaaagactttctgctgtatttgagatgccgcaattattcactgcttatagatcagccggataagtgtgcaaagaaacctttcttgttgctggcgattaagtccctcactccacattttgccagaaggcaagcaatccgggaatcctggggccaagaaagcaacgcagggaaccaaacggtggtgcgagtcttcctgctgggccagacacccccagaggacaaccaccccgacctttcagatatgctgaaatttgagagtgagaagcaccaagacattcttatgtggaactacagagacactttcttcaacttgtctctgaaggaagtgctgtttctcaggtgggtaagtacttcctgcccagacactgagtttgttttcaagggcgatgacgatgtttttgtgaacacccatcacatcctgaattacttgaatagtttatccaagaccaaagccaaagatctcttcataggtgatgtgatccacaatgctggacctcatcgggataagaagctgaagtactacatcccagaagttgtttactctggcctctacccaccctatgcagggggaggggggttcctctactccggccacctggccctgaggctgtaccatatcactgaccaggtccatctctaccccattgatgacgtttatactggaatgtgccttcagaaactcggcctcgttccagagaaacacaaaggcttcaggacatttgatatcgaggagaaaaacaaaaataacatctgctcctatgtagatctgatgttagtacatagtagaaaacctcaagagatgattgatatttggtctcagttgcagagtgctcatttaaaatgctaaaatagatacaaactcaattttgcatagaaaggtgtattttgaatagttcccatgttgtgttctcacattagagtaatttctatattaaaccatgaaaattgcctttatgagtgatacccatttgagggcctctaaacccttcaatttggtactcacgtgaagagggaaagcggaagatggtaatttttttttatggatgatatggcaggatgattggttctgatcttaccggctagtggtcatttttaaaaaacttgtaccctcttatctgaaatcctgtttctggaatttggccattttaagtgattttgtttgccctcttctataatattcctacttcccataataatgactgatttatttgtaattcaggtatttataaacctattggctacaaagactttgttaaacattatccagtggttttcgtgaaatggaattatgtttatttttatgggatttgggtaaattttaaattgtctagaaaactgaaatttcagttgtcagttgtggaattcagtttttcaattgtggaaatttcctgccaccccaacagtatttttgtgtgttaattaattttgcaaaatgagaatcatggtgtgacactcatctaatttatcttgttgtgatgttatggtcataataaggagaaagagggtttaatttttcttgtatttggtttcctggtggtatcatagtgtaattttagtatttgaaaatcagtgtgattccttaatggccaactgaagattgaattgccgctaacaaccatatcgtgttagtgaattttcaatatggaccaggaaggcatatgtattttgaacttgagtgaaaaggttgaagttacagacttttgcatagatggtttgtcaatttaaaattccagaatttattattgccatattttcacatgctgcttatacaagattattattgagtagtaactgcttccctgtctatgtagaagtgcctgtgtttttatttattgttcagatcaaagaccaaaacattttcttaaatatattttatgtaatattttatttgtatacagtgttgttgatgaaatatttaactagagcatgatattttaaatgttaaggtgtaacatatgttaaataaaactgttatttttgaattttaaaatttgttttttgggggtatgaactactagagtttaaaattctgccaaactattacttatatgtactattgtgtaacatactttcttgaaatatttttgtttatagaattgaaggttcttatcagatgggatactggggactataaacaatggaaataaagccactgtatttttaattttttgtgtaatgtgtaatctataatccttttgtttcccatatttgagaacatttttccctgaaagaggccagtttcctccccagaaaccattacagtagtgttgaactatcactgtctctcagtgcgtcatccatctttgcatttaaaatccccaaagtgctttcccatttaaagtctttaaagaaaagtgagaatatttatttatgcttccattttcagtgagtataaataatttaattagggagtggtgtggcattgtaaagattgtgttatcctaagccatttctattttggagtttgtagccacaaagatgaaatatagaatcagccttgactactcaatttcctttcatagacccatgttgagaagacactactaacgtccagtgggaaacaagtagacaattgatgaagctcaaaaaacagaagggttagtgttgtaagagcaaacagtctaatcctgtttggaatgtggaagccatttctgagcaagtatgaggacacaggtgcttgatttgagattgaagactgttttcagcctggtcttcctgaaggtttcctggggcctgcatctgccttctactcccatggctgctagcacacacctcccagagggccatattgccacattatggctagagaagagtaaagaagaaaagaagctctgagaacattcacaggtaattggatcacatttgcatttgtccaaaaaacctgaccacgcattctcaggtaataggtttctcctctcagaggaatttcaattttttttcttgttagagattccccttctctgaggtttcaagtctcttgtagagaaagaagagatggagcaggttttgaatgaggtgtggagggccactggggggccttttgtgagccttcagtccacatgtgtgctgttgtttgaacatgagttcttggtgctgatgacatttggatgagatgatctctggcccttcttcatttggcagaagttcttgtgcaatggctgcccaagcccaccacactggtcattgctgccctgtgagatggacctcatgggctttttagcagagcacgttaggttttagagctttacgcatgcttgggctctgttatggcgcaaacccttaaatccaggaaggcctctcttggtgcccacaatatgggttctcacctgatcccccatctcacggatggaactgctgtaagtctaacttattctttgagaactgtttaacaattaggcctcaagggaaactggtattttgggcccttttcttggctattcccaagtcatgttgattttgagtttgaaggtcaaaaaggctgaaagcattgccagggtttggactattcaaaaacccaagcaggtcttaaaaaaaggatgcaagagacaagaatggctcattccccttcctgatcctggttatacccatgtcctttcttgagatggtcaagagaggctggaaagaagaacaggaaattgggggagtgctttgttacacttggaaattgagtcaagaattaaagacacccaaagtgggccatctcctacttgtccacacctgattggtggtgatgcggaatatttgatgtcccgggtcatcttgactttctcagatgcaaaaagggagggtgactttactaatggaaaggatgggaagctgaaatgaatgaagccttcagttgggccaaagtttaacttccccgtgatttgccttctgatgaaaaatgccagatgaagtgaaaattcttgtttcttgcctagaacaggaaaatacatactttacatgctgggctattgaggctatgaaattaggttttccttaatgtaaatccaattgctagaaacatttgccaaataagattttttgaactgaactttgtttgcattaatctgaaaaactgaagtattctgactcatgaagttctcaaagtaatacactaaaaaagttttgcccttaataccattatatcttgtagaggccaagaatgagggacttctgtctttaaagagccctaaaaatctcgtttgctcacatgatatgaattaccgtatttgttgtaaatgcgcaactttgtatacactaaaagcactgccaatatgattttttatcagttgtgcctcagttagagatattaaaatgtgacatcttaaatattacatattagaataattgaaatacagcatgagtctttatatatttttttaaacccttaaattgaaagatggagtcctaggccgggtgcggtggcttacgcctgtaatcccagcactttgggaggccgaggcaggcggatcatgaggtcaggagttcgagaccagcctggccaacatggtgaaactgcatctctactaaaattacaaaaaattagccgggcgtggtggcggcacctgtaattccagctactcgggaggctgaggcaggagaatggtttgaacccaggaggcggaggttgcagtgagctgagatcacaccactgcactccagcctgggcgacagagcgagactccatctcaaaaaagaaaaaaaaaagagtcctgttcaggtgcatttcctgcttctgtcactttgacctgtgtttatgaattctcatcccaaccaaccctggtggcttttgagctttgtcagttgctttcttcttggctgttgtgcatggtgaaaggggatgtgttaactgcactgaagcagcgagagtagttttaatttgattgtaatccaagggcttatttctaagtcaggggcctggcagttgaacaaagtgtttgcagcttcctgacagctgacccacacgggattggagggtgggcctttgatgctcctcaagcaataagccacatggagaacttgcatcgtaagtgttagcaagggctcacctcactgccttggaaacctaccatcctgtgactcgccctttcccagcctgtcttcaactcacatcctctcttcctgctcatcaccccaggccttcctgaagttggctttcctagctattctactgggcaccaacttccaccacctctttaaaaagtatctcaagtacaaaataaacattatcctatccttggtttgggtttttccagaaaacagactttaagacagggattctagctcaggtaggctttggtggaagtgcaggcacaaagttcagcaggaagtggcccttggaaggcagcagatgaggagtgtgaagccactgccactgtgggattggagctcaaccccacagggaatctggaaaacagtgcagaatgcatgcctcagaacgcacctgtctgaggcttgaaggagctgaacttttttttttttttttgagatggagtctagctctgttgcccaggatgaagtgggcgcaattagtggcgtgatcttggctcactgcaacctccatctcccaggatgaagcaattccccgcctcagcctcccgaatagctgggattacaggcgcccatcactgtgcccagctagtttttgtattttcaatagagacagggttttgccatgttggccaggctggtcttgaactcctgacctcaggtgatccacccacctcggcctcagcaaagtgctgggattacaggcgtgagtcaccgcgcccggcctgaactactttttatttctattttttaagacggagtctctctctgttgcccaggctagagtgtaatggtgcaatcccagctcactgcaacctctgcctcctgggtttaagcaattctcctggctcagcctcccaagtagctgagattacaggcatgtgccacccgtccagctaatttttgtatttttagtagagatggagtttcaccatgttggtcaggctggtcttgaactcctgccctctagtcatctgcccgccttggcctcccaaagtgctaggattacaggcaagagccaccatgtctggccttagtagattgtagaattctgccggaaccatcactccactacaaagccaatttggttttaagtcatgatgattctacccgccctctagaaattttttattttggccctctttttttctttaaaaaatttctgaaacagtttgttctctgattgctcctctttccataggagcctgttcttcatggatgtaaggactgtgtataagaaaatgaattagagttttttttttttttttttacaattcttatctcagggattaggtgagttgttcaccctaattcttatggagaagaacaaatactaagtgatgcttggtcctttaatgcaggactgaactgatttgtagaagttcctaggaggtgtttctttttctgggctgtttacccacaaggccacttcctacactggaaggctgggtgagggtcactgtatggacgtatgtcctggcttcctttcagggactgagcaggttgggggcaggtagacttgaccccagatcttggagctgcctttcttccctttgctctgggtctgtttcgcggtattctactcagctgcttcaacctgaaccctctacctccccttcagtttagggagcattccttagcaggtaagcatctgagctcacgtgcacttaacctgtgtgtttgcgtgtgcgcatgtgcgtgtgcatttgagtcttgaagagttggtgaagccagccccccagttagtcaccccttctgcctcctccaagctgggagcctttccagagaagtcttcctgtaacccacatcccgtgcagccttctccccatcgtgtgctgggctgtggtttcctcttccagtttgtccattaatacagtgccggatgtttcccgtctttcacaaaatgaattatttctcttggtggtattgtcttcactgccagtgcggccttgggcttcttcattatatcttttgttatttagatagggaaggaggcaaacacttctgaccatccactattctgacctgggagcccccagcattttaagtgtattaatttaattttttgagatggtctcactctgttgcccaggctggtgtgcagtggtgtgatctaggcttactgcaatgtctgcctcctgggttcaagtgatcctcgtgcctcagcctcccaagtagctgggaccacaggtgtgtgccaccacacctggctaattttttttttttttttttttgtatttttagtagagatggggttttgctatgttggccaggctggtctcgaactcctggcctccagtgattcacttgccttggctttccaaagtgctgggattacagatgtgagccactgtgcccggcctatttataattttttttttttttttttttttttttttttttttgagacggagtgtcgctctgtcgcccaggtcggactgcggactgcagtggcgcaatctcggctcactgcaagctccgcttcccgggttcacgccattctcctgcctcagcctcccgagtggctgggactacaggcgcccgccaccgcgcccggctaattttttgtatttttagtagagacggggtttcaccttgttagccaggatggtctcgatctcctgacctcatgatccacccgcctcggcctcccaaagtgctgggattacaggcgtgagccaccgcgcccggcctataatttttaaagacagggtctctgtcccccaggctggagtgcagtgatgcaatcatagctcactgcagcctcaacctcctgagctcaagtgaccctcccgtctcagtctcctgagtagctgggactccaggtgtgcgcccccatgcttggctccccagcattttttcttgtctttcctgacctgaggccttcaccacattgacctccacacctggaaattctccttcctgccgtggttacggcatctgttgcccgggttcttgaatctctgcctgaaagctttctttggctgctaagtgctgggcctgatcctcccacactgcacccacagcctcttcctgggtctcttccttggcctccctgcgcagtcctcagagttatctctgtgggcgccctccccgaaatatttccacctctcgttcctttctgagtcaagcccactcttgagtccacctccgtgaaggggctgttggcccttcataccaggagaacccttctaggtttactcctagcccacccattcccagcgtcagcgccctcgcccttctctttcactggagtccaatcaaccctccatttcaaacagttctgtctctccagccctcagtctctccctgaatgtgcaagtcagcctgtccttgaagccagcacgactctcggggtcccctttgcccatctgtgtacacttctcagcttcaaacccagcaagtctcctgccccatccccttcctggggaaatgggtctctttcggaggccccaggcctgagggaggtccattttgtagaaatggaaggggttccattttatggtttctaaggtgtattttccacaaatttaaaaggattgtcagctggatttggtggcttatgcctgtgatcccggcacttcgggaggctgaggcaggaggattgctttaaggccaggagtttgaggccagtcttggtgacttagtgacaacgtgcctctattgcaaaaaaaaaaaagtaaaaggactgtcccttggctcctgatccttttaagtgctcttagctctggggcaggccctcagttcccttccaggttgctctgggttgcccaggaatgtgacggaggtgagaatgcccctcatatcaaggcaagaacgtgaatatctaaggtcggcacctccatcgtcattaggatcagagtgcattctactttgcttgtcctagtggatatctgccctgtgctcagagtcagctcccccacattcccccactcaaatgtaggagcttcccctcctctgactgcctttgggtgaggcccctgccccttgtctaccggaactgggtggaaaggacctgagacagagctgtctccctctgccttatcctcctcctctgccccttctgtagagctcagtagtgggaaagtggccttgggaaggggcctctggggctcgtccacagacacctgaccatgcccaggcggcatcccttcagctgtcagaattcctggggtgggtgggtaggaagcagccaggcccttccagcctcagtctggctctatccaagacctccctggacactagagaaagccccagctctcacctccttttgactcacgaccctctggggctcttcctcctctcattcaagggttcaaggcaactggggtttgccttttctacttttcctactctttctaccttttctacttttccaatctcactgcaaaatgtggcatagtaatgagctgttaactcatcactggataatttatttatagtctggcgtggagagaggggagtgaaaatgtagacttttgttgacacaacatgaagactgcagtgggaaaggcttgcaggaaaccgaactgggcggagattcggcaatcaggcaacaggtgccaaggcgctgcgcagggacctggccgggtcctgccttgtcgtttcagctattggaacctttgaggacagacctacctgcttccgagctgcagtcaaccaggaggccagagctgtggctaccttggcagcagctgtgaagctgctgtttttctggctggggaggtgggagaacccagggaaaacctcagaaaaataaagaaaatctgaatatggacaagctcagatgtcttaaatagcaacaatatcacattaatctttcctcttgtgggatatgagaaatgagtggtagacactgaagataaagttgttgggcttaaagttggtgggaaatgcctttatttatttaattgcaaaagtctctaaaagtgagtcgccacggaaggaatgaagaaggaggggttgtgatggactgtcaagaaagctggggaactttcccactcactgtcttgaagaacaagacaaagagaagatgcaaaaccaccccactgaggctggtgctggaggcctggggagagcatttcattgttgggggtggcctgtctcactggtccctcctccagaagttggagagatgctacctagctgagtgttgagcacttgtccctgcaactgagtacctgctcgacaaataggggctgccatggcaataaaaaacccagctgtggcagatgtttattattgcagacaattagaaatattctctgcattatcccaggtcttggcatagttcattgttggtagaccaacccaataaattacttttctgagataacattgatgtgttgggtgaacctttcacttagaaagctattttattttattttaatttttgaaacagagtcttactctgccatcccagctgggggagtacagtggcacgatctcggctcactgcaacctctgcctaccaggttcaagcgattctgctgcctcagcttcccaagtagctgggattacaggcgcccgccaccacgcccagctaattttttgtattgttagtagagacagggtttctccatattggccaggctggtcttgaactcctgacctcaagtgatctgcctgcctcggcctcccaaagtgttgggattacaggcgtgagccaccgtgcccagcctcacttagaaagctttaaattgaaaagtaaacattttcagttttgaattaattttgacttactgagaagttataaaaatagtatgcagaagccagccgcggtggctcacgcctataatcccagcactttgggaggctgaggtgggcgaatcatgagttcaggggttgaagaccatcctggccaacatggtgaaaccctgtgtctactaaaaatacaaatattagccgggcatggtggcgggtgcctgtaatcccagctacccgggaggctgaggcaggagaatcgctcgaacctgggaggtggaggttgcagtgagctgagatcgtgccattgcactccagcctgggggacaagagcgagacgaagtctcaaaaaaaaaaaatagtatgcagagaacccatatgcctctacccacgtattcccaatgttaacatcttacataatcgtatcataattatcaaaatcaacattggaccaactaagaacagcaatgaaattaacattgctattattctattaactgcactgcaaacctgacttgaattttaccaatgtttttcactaatgtccattttcttttttgttctttttttaatttgacacagggcctcactctgtcacccagggtgagtgcagtggtgtgatcatggctcactgcacccttgacttcctgggcttgtgtgatcctacaggtgtataccaccacgcccagcaaagatgtccactttctgttcccagatgctatttaaggccccacatggcatttggttatttttccttggttttctcccatctgtttctcaatctttccttgtctttcatgactttaacacttctgatgagtactggttatttgtagaatgtccttccatttgggcttgtatggtgttttgcgtgattagaatgaggttatatatttttggcaagaataccacagacgtgatgttttgtccatctcgaggcctcacattgggagctcttgatgtcactgtgtcctattcctggttatattaaccttgtgcactgggttcctccacagtaaggtattgtctttctctttgtagttaaaaagtatcttgggggatattaatatatgtaaaatgtgcaaataattcagtgagtcaatgcatgtaaggtgcttggagcctggcatgtagtaagtgctcgatgaatgagtagctgctgcttttgttgtcattattagtgctgcttctgtgccagttctcttccagcctccctcctctgctgttcagtcctttgactctctgttcattgtcctctgcctcttgggctgatcctcctccggctggttgcttccttacatgaggattgactgtcttgctcaaaatgtctgtgtccttaagcagggccaagaagagctccgttcttctcatcagcgtatggggttgggtggaggaggagcctactattactcaaaggtaagagacaaagctgtgctaacagaacagatgcctctgtctttgcaagttgtgcctacttctgaggtgaccttggggggaccccacctggtccacatccctggaccagaacgcgtcctggagggacaggtcagaggagcagcccacctggctgaggcctggaggcaggaatgagccagaggtgaaactcctcctgggggaggtggtggagttttctccaaggagcggctgggttgctgcgctgagcaacctccaggggcaggagagccagggcgggggtggagggagcatcaggcctgctgggggaggcctcccctgcccgcgacgggcaaggcagtgccagttaaagcaagcttagttccctctgtagatgagagcaggggttccctccttcctcagtcggggttaggagatgccagcatgctccagttgctttctggggctcccataccctggtctagcacacagaactctatctgcagaatggctgttcttggcagcaatctcagccttccagactccgctccaactttggagcatttgagctctatttttatgcagagaggagaagtttcccatgtttgaaaatagctgccatgcagaggactgtggtagctcctgttgttggttgtccttctgtcctcctttttctggagatggactgtgccccggggctgtggggtgataaacgggcctattggaaccctcctggggactgggagagggaagctcttcttccactggtgttgctaaatgggcatggtggagttgcctggccctctccctaacaagtcagaatgagggcaacacttgtggaaggaagaggggctgggagtggtgccagcgtccgtgagccccttgcacctgcctccatcctggccttcccagccacgtgagcctttttcttttttgcttaagctgactggagtcggtcctgactgataccatgaaggcctgcttccttccctgagttctaaggtgagcccagctgcaggtgcctccagattcccaccctgaaacacccaattttaagactgtgatagttgcttccagtaggcagctggggaagaaacttgatgtacctgcgttaggccaaaaatctaagtggaaagacttaggaagcagggaacacctttcttcagctgttcaatgttcagtgttcagtgtcggtccgaagacccctgggtgagagataacagtttctctttcagcgtcaagtttatacatttagtttatagatgtttgctttggtgacaagtgaagagctgaaaaaagaaggagtgtgcatgcaaacccagttccttgggagaggaagatgctggtgggctgggaagagatttcaagggggagagaggtgcttggctgcctgtatagtcattgtggggtgtgggccagatgtgtcaggtcttatggcctaggagggagagctgggtttagaccctcactcttccatagcacagtaacaaacagcctggcccgcccagaggggaaggtggatgctcattagaaatttctgtgctccaagctgccctgggttctcctgggccagagcaagctggggtctggtcttgcccctctgctgaggctggaacagctgaccgacagccccctgctgtcacattcctggaaatatgcagggacccctgtgccccacctgggggagaattggggtctggctatgtggcaagcactcgggaagcagggagggaagcgtagtatgcctgtgtgctgtggcccactcatcccagtcccggccccttcctcatgtaacagatgagcaaaatgaagccaacccaagtttaaacaactagcaagtattttatacttggggccaggatttatacctgcagtctctgattccattgcccgtggactttaccccgctatgggaccgtctccctgagccttccaaaggaggacatgtgccaccaaagggctaccagcactgcaaagtctgtcagctccctacccatgaacttgtatttgccttttgccctttgaccccactgtccagagatttttgtctccatcaactgcctcactcaggcgtcgtcagcccagagtctgacccgagtcccacttttgcctcactgtgcaaagcttgggttcctactcacagacctacagtgtttgtcagtaaagaggtgggccaccccagagtagacatgtgttattagattag

SEQ ID NO: 1387 - DNA, 2583 bp, Homo sapiens
cgcagcggcagcggcagcagcggcaacaagtgccggaggctagcagagccaagccggagcagtccctgccgccgacaccgccgggccgcccgtccggggcgccgcgcatggagcgtgagctgcggcggtcgccgggctgagccgcgcggagcggccgggacgtggatgtggccgcgatctcccgcccttgcccccgccccgccgagctggagctgctcccggacaagaataaagttgttgggtatcctgatgatggcaaatgtcttcatttattttattatggaagtctccaaaagcagtagccaagaaaaaaatggaaaaggggaagtaataatacccaaagagaagttctggaagatatctacccctcccgaggcatactggaaccgagagcaagagaagctgaaccggcagtacaaccccatcctgagcatgctgaccaaccagacgggggaggcgggcaggctctccaatataagccatctgaactactgcgaacctgacctgagggtcacgtcggtggttacgggttttaacaacttgccggacagatttaaagactttctgctgtatttgagatgccgcaattattcactgcttatagatcagccggataagtgtgcaaagaaacctttcttgttgctggcgattaagtccctcactccacattttgccagaaggcaagcaatccgggaatcctggggccaagaaagcaacgcagggaaccaaacggtggtgcgagtcttcctgctgggccagacacccccagaggacaaccaccccgacctttcagatatgctgaaatttgagagtgagaagcaccaagacattcttatgtggaactacagagacactttcttcaacttgtctctgaaggaagtgctgtttctcaggtgggtaagtacttcctgcccagacactgagtttgttttcaagggcgatgacgatgtttttgtgaacacccatcacatcctgaattacttgaatagtttatccaagaccaaagccaaagatctcttcataggtgatgtgatccacaatgctggacctcatcgggataagaagctgaagtactacatcccagaagttgtttactctggcctctacccaccctatgcagggggaggggggttcctctactccggccacctggccctgaggctgtaccatatcactgaccaggtccatctctaccccattgatgacgtttatactggaatgtgccttcagaaactcggcctcgttccagagaaacacaaaggcttcaggacatttgatatcgaggagaaaaacaaaaataacatctgctcctatgtagatctgatgttagtacatagtagaaaacctcaagagatgattgatatttggtctcagttgcagagtgctcatttaaaatgctaaaatagatacaaactcaattttgcatagaaaggtgtattttgaatagttcccatgttgtgttctcacattagagtaatttctatattaaaccatgaaaattgcctttatgagtgatacccatttgagggcctctaaacccttcaatttggtactcacgtgaagagggaaagcggaagatggtaatttttttttatggatgatatggcaggatgattggttctgatcttaccggctagtggtcatttttaaaaaacttgtaccctcttatctgaaatcctgtttctggaatttggccattttaagtgattttgtttgccctcttctataatattcctacttcccataataatgactgatttatttgtaattcaggtatttataaacctattggctacaaagactttgttaaacattatccagtggttttcgtgaaatggaattatgtttatttttatgggatttgggtaaattttaaattgtctagaaaactgaaatttcagttgtcagttgtggaattcagtttttcaattgtggaaatttcctgccaccccaacagtatttttgtgtgttaattaattttgcaaaatgagaatcatggtgtgacactcatctaatttatcttgttgtgatgttatggtcataataaggagaaagagggtttaatttttcttgtatttggtttcctggtggtatcatagtgtaattttagtatttgaaaatcagtgtgattccttaatggccaactgaagattgaattgccgctaacaaccatatcgtgttagtgaattttcaatatggaccaggaaggcatatgtattttgaacttgagtgaaaaggttgaagttacagacttttgcatagatggtttgtcaatttaaaattccagaatttattattgccatattttcacatgctgcttatacaagattattattgagtagtaactgcttccctgtctatgtagaagtgcctgtgtttttatttattgttcagatcaaagaccaaaacattttcttaaatatattttatgtaatattttatttgtatacagtgttgttgatgaaatatttaactagagcatgatattttaaatgttaaggtgtaacatatgttaaataaaactgttatttttgaattttaaaatttgttttttgggggtatgaactactagagtttaaaatt

SEQ ID NO: 1388 - protein, 405 aa, Homo sapiens
MWPRSPAPAPPSWSCSRTRIKLLGILMMANVFIYFIMEVSKSSSQEKNGKGEVIIPKEKFWKISTPPEAYWNREQEKLNRQYNPILSMLTNQTGEAGRLSNISHLNYCEPDLRVTSVVTGFNNLPDRFKDFLLYLRCRNYSLLIDQPDKCAKKPFLLLAIKSLTPHFARRQAIRESWGQESNAGNQTVVRVFLLGQTPPEDNHPDLSDMLKFESEKHQDILMWNYRDTFFNLSLKEVLFLRWVSTSCPDTEFVFKGDDDVFVNTHHILNYLNSLSKTKAKDLFIGDVIHNAGPHRDKKLKYYIPEVVYSGPPYAGGGGFKGHLALRLYHITDQVHLYPIDDVYTGMCLQKLGLVPEKHKGFRTFDIEEKNKNNICSYVDLMLVHSRKPQEMIDIWSQLQSAHLKC

SEQ ID NO: 1389 - DNA, 4885 bp, Homo sapiens
cctggagtgaggcgcagcggcagcggcagcagcggcaacaagtgccggaggctagcagagccaagccggagcagtccctgccgccgacaccgccgggccgcccgtccggggcgccgcgcatggagcgtgagctgcggcggtcgccgggctgagccgcgcggagcggccgggacgtggatgtggccgcgatctcccgcccttgcccccgccccgccgagctggagctgctcccggacaagatatgagaaatgagtgttggacgtcgaagaataaagttgttgggtatcctgatgatggcaaatgtcttcatttattttattatggaagtctccaaaagcagtagccaagaaaaaaatggaaaaggggaagtaataatacccaaagagaagttctggaagatatctacccctcccgaggcatactggaaccgagagcaagagaagctgaaccggcagtacaaccccatcctgagcatgctgaccaaccagacgggggaggcgggcaggctctccaatataagccatctgaactactgcgaacctgacctgagggtcacgtcggtggttacgggttttaacaacttgccggacagatttaaagactttctgctgtatttgagatgccgcaattattcactgcttatagatcagccggataagtgtgcaaagaaacctttcttgttgctggcgattaagtccctcactccacattttgccagaaggcaagcaatccgggaatcctggggccaagaaagcaacgcagggaaccaaacggtggtgcgagtcttcctgctgggccagacacccccagaggacaaccaccccgacctttcagatatgctgaaatttgagagtgagaagcaccaagacattcttatgtggaactacagagacactttcttcaacttgtctctgaaggaagtgctgtttctcaggtgggtaagtacttcctgcccagacactgagtttgttttcaagggcgatgacgatgtttttgtgaacacccatcacatcctgaattacttgaatagtttatccaagaccaaagccaaagatctcttcataggtgatgtgatccacaatgctggacctcatcgggataagaagctgaagtactacatcccagaagttgtttactctggcctctacccaccctatgcagggggaggggggttcctctactccggccacctggccctgaggctgtaccatatcactgaccaggtccatctctaccccattgatgacgtttatactggaatgtgccttcagaaactcggcctcgttccagagaaacacaaaggcttcaggacatttgatatcgaggagaaaaacaaaaataacatctgctcctatgtagatctgatgttagtacatagtagaaaacctcaagagatgattgatatttggtctcagttgcagagtgctcatttaaaatgctaaaatagatacaaactcaattttgcatagaaaggtgtattttgaatagttcccatgttgtgttctcacattagagtaatttctatattaaaccatgaaaattgcctttatgagtgatacccatttgagggcctctaaacccttcaatttggtactcacgtgaagagggaaagcggaagatggtaatttttttttatggatgatatggcaggatgattggttctgatcttaccggctagtggtcatttttaaaaaacttgtaccctcttatctgaaatcctgtttctggaatttggccattttaagtgattttgtttgccctcttctataatattcctacttcccataataatgactgatttatttgtaattcaggtattttggttttcgtgaaatggaattatgtttatttttatgggatttgggtaaattttaaattgtctagaaaactgaaatttcagttgtcagttgtggaattcagtttttcaattgtggaaatttcctgccaccccaacagtatttttgtgtgttaattaattttgcaaaatgagaatcatggtgtgacactcatctaatttatcttgttgtgatgttatggtcataataaggagaaagagggtttaatttttcttgtatttggtttcctggtggtatcatagtgtaattttagtatttgaaaatcagtgtgattccttaatggccaactgaagattgaattgccgctaacaaccatatcgtgttagtgaattttcaatatggaccaggaaggcatatgtattttgaacttgagtgaaaaggttgaagttacagacttttgcatagatggtttgtcaatttaaaattccagaatttattattgccatattttcacatgctgcttatacaagattattattgagtagtaactgcttccctgtctatgtagaagtgcctgtgtttttatttattgttcagatcaaagaccaaaacattttcttaaatatattttatgtaatattttatttgtatacagtgttgttgatgaaatatttaactagagcatgatattttaaatgttaaggtgtaacatatgttaaataaaactgttatttttgaattttaaaatttgttttttgggggtatgaactactagagtttaaaattctgccaaactattacttatatgtactattgtgtaacatactttcttgaaatatttttgtttatagaattgaaggttcttatcagatgggatactggggactataaacaatggaaataaagccactgtatttttaattttttgtgtaatgtgtaatctataatccttttgtttcccatatttgagaacatttttccctgaaagaggccagtttcctccccagaaaccattacagtagtgttgaactatcactgtctctcagtgcgtcatccatctttgcatttaaaatccccaaagtgctttcccatttaaagtctttaaagaaaagtgagaatatttatttatgcttccattttcagtgagtataaataatttaattagggagtggtgtggcattgtaaagattgtgttatcctaagccatttctattttggagtttgtagccacaaagatgaaatatagaatcagccttgactactcaatttcctttcatagacccatgttgagaagacactactaacgtccagtgggaaacaagtagacaattgatgaagctcaaaaaacagaagggttagtgttgtaagagcaaacagtctaatcctgtttggaatgtggaagccatttctgagcaagtatgaggacacaggtgcttgatttgagattgaagactgttttcagcctggtcttcctgaaggtttcctggggcctgcatctgccttctactcccatggctgctagcacacacctcccagagggccatattgccacattatggctagagaagagtaaagaagaaaagaagctctgagaacattcacaggtaattggatcacatttgcatttgtccaaaaaacctgaccacgcattctcaggtaataggtttctcctctcagaggaatttcaattttttttcttgttagagattccccttctctgaggtttcaagtctcttgtagagaaagaagagatggagcaggttttgaatgaggtgtggagggccactggggggccttttgtgagccttcagtccacatgtgtgctgttgtttgaacatgagttcttggtgctgatgacatttggatgagatgatctctggcccttcttcatttggcagaagttcttgtgcaatggctgcccaagcccaccacactggtcattgctgccctgtgagatggacctcatgggctttttagcagagcacgttaggttttagagctttacgcatgcttgggctctgttatggcgcaaacccttaaatccaggaaggcctctcttggtgcccacaatatgggttctcacctgatcccccatctcacggatggaactgctgtaagtctaacttattctttgagaactgtttaacaattaggcctcaagggaaactggtattttgggcccttttcttggctattcccaagtcatgttgattttgagtttgaaggtcaaaaaggctgaaagcattgccagggtttggactattcaaaaacccaagcaggtcttaaaaaaaggatgcaagagacaagaatggctcattccccttcctgatcctggttatacccatgtcctttcttgagatggtcaagagaggctggaaagaagaacaggaaattgggggagtgctttgttacacttggaaattgagtcaagaattaaagacacccaaagtgggccatctcctacttgtccacacctgattggtggtgatgcggaatatttgatgtcccgggtcatcttgactttctcagatgcaaaaagggagggtgactttactaatggaaaggatgggaagctgaaatgaatgaagccttcagttgggccaaagtttaacttccccgtgatttgccttctgatgaaaaatgccagatgaagtgaaaattcttgtttcttgcctagaacaggaaaatacatactttacatgctgggctattgaggctatgaaattaggttttccttaatgtaaatccaattgctagaaacatttgccaaataagattttttgaactgaactttgtttgcattaatctgaaaaactgaagtattctgactcatgaagttctcaaagtaatacactaaaaaagttttgcccttaataccattatatcttgtagaggccaagaatgagggacttctgtctttaaagagccctaaaaatctcgtttgctcacatgatatgaattaccgtatttgttgtaaatgcgcaactttgtatacactaaaagcactgccaatatgattttttatcagttgtgcctcagttagagatattaaaatgtgacatcttaaatattacatattagaataattg

SEQ ID NO: 1390 - protein, 393 aa, Homo sapiens
MSVGRRRIKLLGILMMANVFIYFIMEVSKSSSQEKNGKGEVIIPKEKFWKISTPPEAYWNREQEKLNRQYNPILSMLTNQTGEAGRLSNISHLNYCEPDLRVTSVVTGFNNLPDRFKDFLLYLRCRNYSLLIDQPDKCAKKPFLLLAIKSLTPHFARRQAIRESWGQESNAGNQTVVRVFLLGQTPPEDNHPDLSDMLKFESEKHQDILMWNYRDTFFNLSLKEVLFLRWVSTSCPDTEFVFKGDDDVFVNTHHILNYLNSLSKTKAKDLFIGDVIHNAGPHRDKKLKYYIPEVVYSGPPYAGGGGFKGHLALRLYHITDQVHLYPIDDVYTGMCLQKLGLVPEKHKGFRTFDIEEKNKNNICSYVDLMLVHSRKPQEMIDIWSQLQSAHLKC

SEQ ID NO: 1391 - DNA, 4927 bp, Homo sapiens
cctggagtgaggcgcagcggcagcggcagcagcggcaacaagtgccggaggctagcagagccaagccggagcagtccctgccgccgacaccgccgggccgcccgtccggggcgccgcgcatggagcgtgagctgcggcggtcgccgggctgagccgcgcggagcggccgggacgtggatgtggccgcgatctcccgcccttgcccccgccccgccgagctggagctgctcccggacaagatatgagaaatgagtgttggacgtcgaagaataaagttgttgggtatcctgatgatggcaaatgtcttcatttattttattatggaagtctccaaaagcagtagccaagaaaaaaatggaaaaggggaagtaataatacccaaagagaagttctggaagatatctacccctcccgaggcatactggaaccgagagcaagagaagctgaaccggcagtacaaccccatcctgagcatgctgaccaaccagacgggggaggcgggcaggctctccaatataagccatctgaactactgcgaacctgacctgagggtcacgtcggtggttacgggttttaacaacttgccggacagatttaaagactttctgctgtatttgagatgccgcaattattcactgcttatagatcagccggataagtgtgcaaagaaacctttcttgttgctggcgattaagtccctcactccacattttgccagaaggcaagcaatccgggaatcctggggccaagaaagcaacgcagggaaccaaacggtggtgcgagtcttcctgctgggccagacacccccagaggacaaccaccccgacctttcagatatgctgaaatttgagagtgagaagcaccaagacattcttatgtggaactacagagacactttcttcaacttgtctctgaaggaagtgctgtttctcaggtgggtaagtacttcctgcccagacactgagtttgttttcaagggcgatgacgatgtttttgtgaacacccatcacatcctgaattacttgaatagtttatccaagaccaaagccaaagatctcttcataggtgatgtgatccacaatgctggacctcatcgggataagaagctgaagtactacatcccagaagttgtttactctggcctctacccaccctatgcagggggaggggggttcctctactccggccacctggccctgaggctgtaccatatcactgaccaggtccatctctaccccattgatgacgtttatactggaatgtgccttcagaaactcggcctcgttccagagaaacacaaaggcttcaggacatttgatatcgaggagaaaaacaaaaataacatctgctcctatgtagatctgatgttagtacatagtagaaaacctcaagagatgattgatatttggtctcagttgcagagtgctcatttaaaatgctaaaatagatacaaactcaattttgcatagaaaggtgtattttgaatagttcccatgttgtgttctcacattagagtaatttctatattaaaccatgaaaattgcctttatgagtgatacccatttgagggcctctaaacccttcaatttggtactcacgtgaagagggaaagcggaagatggtaatttttttttatggatgatatggcaggatgattggttctgatcttaccggctagtggtcatttttaaaaaacttgtaccctcttatctgaaatcctgtttctggaatttggccattttaagtgattttgtttgccctcttctataatattcctacttcccataataatgactgatttatttgtaattcaggtatttataaacctattggctacaaagactttgttaaacattatccagtggttttcgtgaaatggaattatgtttatttttatgggatttgggtaaattttaaattgtctagaaaactgaaatttcagttgtcagttgtggaattcagtttttcaattgtggaaatttcctgccaccccaacagtatttttgtgtgttaattaattttgcaaaatgagaatcatggtgtgacactcatctaatttatcttgttgtgatgttatggtcataataaggagaaagagggtttaatttttcttgtatttggtttcctggtggtatcatagtgtaattttagtatttgaaaatcagtgtgattccttaatggccaactgaagattgaattgccgctaacaaccatatcgtgttagtgaattttcaatatggaccaggaaggcatatgtattttgaacttgagtgaaaaggttgaagttacagacttttgcatagatggtttgtcaatttaaaattccagaatttattattgccatattttcacatgctgcttatacaagattattattgagtagtaactgcttccctgtctatgtagaagtgcctgtgtttttatttattgttcagatcaaagaccaaaacattttcttaaatatattttatgtaatattttatttgtatacagtgttgttgatgaaatatttaactagagcatgatattttaaatgttaaggtgtaacatatgttaaataaaactgttatttttgaattttaaaatttgttttttgggggtatgaactactagagtttaaaattctgccaaactattacttatatgtactattgtgtaacatactttcttgaaatatttttgtttatagaattgaaggttcttatcagatgggatactggggactataaacaatggaaataaagccactgtatttttaattttttgtgtaatgtgtaatctataatccttttgtttcccatatttgagaacatttttccctgaaagaggccagtttcctccccagaaaccattacagtagtgttgaactatcactgtctctcagtgcgtcatccatctttgcatttaaaatccccaaagtgctttcccatttaaagtctttaaagaaaagtgagaatatttatttatgcttccattttcagtgagtataaataatttaattagggagtggtgtggcattgtaaagattgtgttatcctaagccatttctattttggagtttgtagccacaaagatgaaatatagaatcagccttgactactcaatttcctttcatagacccatgttgagaagacactactaacgtccagtgggaaacaagtagacaattgatgaagctcaaaaaacagaagggttagtgttgtaagagcaaacagtctaatcctgtttggaatgtggaagccatttctgagcaagtatgaggacacaggtgcttgatttgagattgaagactgttttcagcctggtcttcctgaaggtttcctggggcctgcatctgccttctactcccatggctgctagcacacacctcccagagggccatattgccacattatggctagagaagagtaaagaagaaaagaagctctgagaacattcacaggtaattggatcacatttgcatttgtccaaaaaacctgaccacgcattctcaggtaataggtttctcctctcagaggaatttcaattttttttcttgttagagattccccttctctgaggtttcaagtctcttgtagagaaagaagagatggagcaggttttgaatgaggtgtggagggccactggggggccttttgtgagccttcagtccacatgtgtgctgttgtttgaacatgagttcttggtgctgatgacatttggatgagatgatctctggcccttcttcatttggcagaagttcttgtgcaatggctgcccaagcccaccacactggtcattgctgccctgtgagatggacctcatgggctttttagcagagcacgttaggttttagagctttacgcatgcttgggctctgttatggcgcaaacccttaaatccaggaaggcctctcttggtgcccacaatatgggttctcacctgatcccccatctcacggatggaactgctgtaagtctaacttattctttgagaactgtttaacaattaggcctcaagggaaactggtattttgggcccttttcttggctattcccaagtcatgttgattttgagtttgaaggtcaaaaaggctgaaagcattgccagggtttggactattcaaaaacccaagcaggtcttaaaaaaaggatgcaagagacaagaatggctcattccccttcctgatcctggttatacccatgtcctttcttgagatggtcaagagaggctggaaagaagaacaggaaattgggggagtgctttgttacacttggaaattgagtcaagaattaaagacacccaaagtgggccatctcctacttgtccacacctgattggtggtgatgcggaatatttgatgtcccgggtcatcttgactttctcagatgcaaaaagggagggtgactttactaatggaaaggatgggaagctgaaatgaatgaagccttcagttgggccaaagtttaacttccccgtgatttgccttctgatgaaaaatgccagatgaagtgaaaattcttgtttcttgcctagaacaggaaaatacatactttacatgctgggctattgaggctatgaaattaggttttccttaatgtaaatccaattgctagaaacatttgccaaataagattttttgaactgaactttgtttgcattaatctgaaaaactgaagtattctgactcatgaagttctcaaagtaatacactaaaaaagttttgcccttaataccattatatcttgtagaggccaagaatgagggacttctgtctttaaagagccctaaaaatctcgtttgctcacatgatatgaattaccgtatttgttgtaaatgcgcaactttgtatacactaaaagcactgccaatatgattttttatcagttgtgcctcagttagagatattaaaatgtgacatcttaaatattacatattagaataattg

SEQ ID NO: 1392 - protein, 393 aa, Homo sapiens; identical to SEQ ID NO: 1390

SEQ ID NO: 1393 - DNA, 2706 bp, Homo sapiens
cctggagtgaggcgcagcggcagcggcagcagcggcaacaagtgccggaggctagcagagccaagccggagcagtccctgccgccgacaccgccgggccgcccgtccggggcgccgcgcatggagcgtgagctgcggcggtcgccgggctgagccgcgcggagcggccgggacgtggatgtggccgcgatctcccgcccttgcccccgccccgccgagctggagctgctcccggacaagatatgagaaatgagtgttggacgtcgaagaataaagttgttgggtatcctgatgatggcaaatgtcttcatttattttattatggaagtctccaaaagcagtagccaagaaaaaaatggaaaaggggaagtaataatacccaaagagaagttctggaagatatctacccctcccgaggcatactggaaccgagagcaagagaagctgaaccggcagtacaaccccatcctgagcatgctgaccaaccagacgggggaggcgggcaggctctccaatataagccatctgaactactgcgaacctgacctgagggtcacgtcggtggttacgggttttaacaacttgccggacagatttaaagactttctgctgtatttgagatgccgcaattattcactgcttatagatcagccggataagtgtgcaaagaaacctttcttgttgctggcgattaagtccctcactccacattttgccagaaggcaagcaatccgggaatcctggggccaagaaagcaacgcagggaaccaaacggtggtgcgagtcttcctgctgggccagacacccccagaggacaaccaccccgacctttcagatatgctgaaatttgagagtgagaagcaccaagacattcttatgtggaactacagagacactttcttcaacttgtctctgaaggaagtgctgtttctcaggtgggtaagtacttcctgcccagacactgagtttgttttcaagggcgatgacgatgtttttgtgaacacccatcacatcctgaattacttgaatagtttatccaagaccaaagccaaagatctcttcataggtgatgtgatccacaatgctggacctcatcgggataagaagctgaagtactacatcccagaagttgtttactctggcctctacccaccctatgcagggggaggggggttcctctactccggccacctggccctgaggctgtaccatatcactgaccaggtccatctctaccccattgatgacgtttatactggaatgtgccttcagaaactcggcctcgttccagagaaacacaaaggcttcaggacatttgatatcgaggagaaaaacaaaaataacatctgctcctatgtagatctgatgttagtacatagtagaaaacctcaagagatgattgatatttggtctcagttgcagagtgctcatttaaaatgctaaaatagatacaaactcaattttgcatagaaaggtgtattttgaatagttcccatgttgtgttctcacattagagtaatttctatattaaaccatgaaaattgcctttatgagtgatacccatttgagggcctctaaacccttcaatttggtactcacgtgaagagggaaagcggaagatggtaatttttttttatggatgatatggcaggatgattggttctgatcttaccggctagtggtcatttttaaaaaacttgtaccctcttatctgaaatcctgtttctggaatttggccattttaagtgattttgtttgccctcttctataatattcctacttcccataataatgactgatttatttgtaattcaggtatttataaacctattggctacaaagactttgttaaacattatccagtggttttcgtgaaatggaattatgtttatttttatgggatttgggtaaattttaaattgtctagaaaactgaaatttcagttgtcagttgtggaattcagtttttcaattgtggaaatttcctgccaccccaacagtatttttgtgtgttaattaattttgcaaaatgagaatcatggtgtgacactcatctaatttatcttgttgtgatgttatggtcataataaggagaaagagggtttaatttttcttgtatttggtttcctggtggtatcatagtgtaattttagtatttgaaaatcagtgtgattccttaatggccaactgaagattgaattgccgctaacaaccatatcgtgttagtgaattttcaatatggaccaggaaggcatatgtattttgaacttgagtgaaaaggttgaagttacagacttttgcatagatggtttgtcaatttaaaattccagaatttattattgccatattttcacatgctgcttatacaagattattattgagtagtaactgcttccctgtctatgtagaagtgcctgtgtttttatttattgttcagatcaaagaccaaaacattttcttaaatatattttatgtaatattttatttgtatacagtgttgttgatgaaatatttaactagagcatgatattttaaatgttaaggtgtaacatatgttaaataaaactgttatttttgaattttaaaatttgttttttgggggtatgaactactagagtttaaaattatttttgtttatagaattgaaggttcttatcagatgggatactggggactataaacaatggaaataaagccactgtattttt

SEQ ID NO: 1394 - protein, 393 aa, Homo sapiens; identical to SEQ ID NO: 1390

SEQ ID NO: 1395 - DNA, 52616 bp, Mus musculus
  misc_feature (1)...(52616): n = A,T,C or G
tgcccaggaccaacaccatggaaaaagagaatcagccccttgaagatgttctcacacatacacatgcacactacacgtgcacatacatgactctagagaaccctgactaatacattgccccaccaaaattctacagttagtataaggaattgaagcatataactctggcatctacagttttataaaaaaaaattttctgggtttgaaagttataatgtaggagagagacaaatctgatgagatgatcaaatattccacattttatctgagagggagatgtccataagtaaaattctgaacatttaagattcttgtcttttgttctacctatcatgattcaattaaaaacatttttagtggataagagtactagaagctcttacagagggcccaggattgaatctcagttacccacacgatagctcacaatcacccataactccaattccaggaaatctgagaccttcttctcttcttagaggacaccaggacattcaggtggtgcagatacatacatgcaggcaaaacgtgcatatacataaaactaaaatgtttgtttgtttgtttacttatttacttatctatttggtttttttttttcaagacagggtttctctgagtagccctggctgtcctggaactcattctgtagaccacattggcctcagaacttagaaatccacctgtctatgcctcccaagtgctgggattaaagatatgctccaccaccagcatcacctcctggatcaaaaaaatttttaaatgagttgatgttttctggctttgacgtgtatgcaaatgtatgcagcatatttcctttctttttatcttgttcaagactgtttgggaaattcaactgtgtttttgactatagttaaaaatcattaattttttttattgctactaaggctcaattatatgactataccacaggtttttgttgttgtggcctatgccatagttttttaagaagtaattttatccattctattttgtagttgtatctagtctggagaaattattggagttgtgtctattcttggggaaattgtggagaaaacctctgtatgccttttggcatttatgagtgtccagtcttcagaccacattcgtggtggtaaaatggctggcctggggctgtggtggtgaaatggctggcttgggggtatggtggtgaaatggctggcttgaagggtgtggtggtgaaatggctggcttggggctgtggtggtgaaatggttggtttgggtgtgtgtttaattgggtgttgacctcttttttcctagacagttcccatcttcttaatagcctattgatgaagttaacacccacatgattcaatcatttcttaatattgccactagcccagaacccagttaacaagacataaacactgaagaggagaatacttcaatctaaactgtaactacaggctttccaaaatgtctgagaaaaatcaacttgaagaaacaaatatgtattttcagtgtgtgtggttatttggttctcttgtttctggacttgtggaaagaggttataagagaggaaatgtgtccacctcaggacagccagagtgcagagaggaagaggtagcaaggtgtggttagaggaaagataaaatctctccaggcatgcccacaggaacttatttcctccagtgaggcctcagctcccataggctctaccacctcccagtaatcagtctaactatgagcccctcattgggttaatccctgagggagttcaagcccgaatagttcattttccagaatgtcacttccgaaccataagaatcaggtacatcatctgcacgcaagagcctttgggggacatggatatttaaaccataacaacctcattaaaattccaccacttaccccagaaacatcctgcaggaaaaacgtttacttgtttgcctttctggttcaggatccaatataaaaacccacaatcccatgttgtactaatctgtaacaagtttaacacaaaccatgtctcttctggcctcacagtcaatacaactcctcccgtgagctctatctaccaacatgtgtggggattcagactccacagcaccatgttctacagctcggcgccactcagatgctgtctggacacaatcagatcttacaggttgaggaatcagtcctacagatgccaatcccaagtccaggacacccagtggttccaactaaccagaaacaaacaggttcctgcagcttcctccttgggttttagttgaattggtagggtaccatcacagaacttaggacttacatttaccagtttattataaataatattaaatacatgtaatggctattcttggttgtcaatttgactacaattggaatgaactaaaacccaaaagtggagggcacatctgtgagggttttctgcttagtttgaagggagatctacttctaaactggatctttgaggtaggaagacaagcctttaatccagatcttgaggcaggaacacacaacacatactcttaatttagatctaatgtgagccacactttctcttggaagcctatataaagacatgaaagaagaaaggttttgcattttgcctgcttgctcttgccttgtcagcaagtccattcctttgctggcattagagcctacctgtttgagattttcgtgtatacattcagcctcatggactgagaaacttttggatcctgggactttctgttcatatatatatatatatatatatatatatagagagagagagagagagagattcatttcacaagttctgttactctagagtagcagttctcatctgtgatttggagaaagctcttatttctggtggtcttaggaactgcgacactgctcagtagcaaaattgcagtcatgaagtagcaacaaaaataattttatgattgtagttcaccacaacatgaggaactgtattaaagggttgcagcattagaaaactagaaaaccctaactaatataatagatacaaatgaacaactagatgaaggtggttcaacccagctatggtgaaggtcattactaacaaaagatatgcctaccactaaggaaaatttggaatattttaggagttctatggtagacacaatagaaatgccaaatatatttcatattattccagatcatatccatttggtcttcttcaatctaaatagttctttagtcttgtcttggcatttcttaaaaatggagtcagttatgaaaaagaatatcctcaatgtactaatcttatattctcttatacttaaatctaggttgtgcattttcagaatgaagaaacccacagaagtgacattatgtgtttcttggtgcatgatatcataaaacagataatgtcaacttttccttttacacttaaggccaactatttcttaaagaaaggatcttgctatatagcctagcttccaattctcagtgcctctgtctcagcctcttgaatggttggattataaggtatatgccactatattaggctagtaatgtaaattttaataatttaattaaagaggtaggatcttccaggcttctcaactacaaagctatttatttgtctttgatatgttctgaggttgtttggttttgctctttaagacaaggtctgattctatattccaggctaggcctgaaatttgttgtgaactagcatggggattacaggcatgaagtgctgtagtggctcatcttggttgtcaacttgatcacatccactaaaaactaaaacacaagctagtagccactcctgtgagggatttccttatccaattatttgaagatgaaaggcccaccctaaatgtgggcagtgcttctcacagtggtgcagataaaagaagcagcaaacttcacactttgcctccttgctctctccctttacagatattagaagcaacttctccaggattccaatggagtctaaagactggctctccaaacaccctaggtcttgagtaccagatctggatggctggtacatccagccctgtgaactgtaccagaatcttggcctctccagtgtgagacagacaccattggacttccaagatagcatcttgtaagtcgatataataaatctccatttattacatttccattttattctttctgtttctttagagacctctgactaatacagaggcactgtgcctagtggaggttctttaatgccatattagtgatagtttttcttatcaaacttagtagtatgttttaagtttcatttttgggtattaatactatgtagaaattaaattgattacaacaaattaacatggcaggctaaatgttttaatttttttttttttttttgttttttttgtttttttttgtttttcgaggcagggtttctctgtgtagccctggctgttctggaactcacactgtagaccaggctggcctcgaactcagaaatccgcctgcctctgcctcccaagtcctgggattaaaggcgtgtgcccccacatccggcgatgttttaattgttattttagttattgtttaagcatcttaattattttaaaatctttactttttatgtttttctgtttcatgccttatacactttgttttgtttccctgtctcttgtctgtgctggaagggaattaaatactcatagcaatagtggatatccttgtctcatcaccagctttatgaaggaagatttttataatttactatttaatatattctctgtagattttttagaataaattttaatgaaaaatatttttgtccctggatactggctgttttcagtatcgtggctgcctatcagtcatactgtacacctcctcttctgagcctacttttattccacacagatgctaattatatttacaaactcttcaatattgatccaatcttgaacctcttggataaacattgtttagtcatgtataactgctagaggagtagtcttaatttatgaataagtcctagtaactctctgtgagaaatattttcagctctgtggcccgggtagcagccatttctgctctccagctccttgttccttttccagacacaatgacgacaaaacagatcaccccaacagtgagaagtctaaaacacaagaatttctccattcctctttttcctgtgagtcgataattaattccagagctaccctgtaaatgcggcttttacttcctcagaagaaggggtgagacgagagctgtactccacctgtgcaaatgcacagcttgggcagtgctccgggcagtgctcctccctagtgcttctttctctggtcttactatccctcggcctcggcctggaagcttctgggctctgtacaatctgatcctctgccaggccacatcttggaggtttcagcttccagtctccatctgctaacctaggcctagagtttttcaaccttctagatttactgctgaataaaacttactttttctagctctttctgaattctggctggttgattcaacccagctgttctggctcaaactcctttccaacctgacagattcaaattggtttctcttggcttttgactgagttgctctgcttagaaaacctgcctctgaatgccacaaactgaactgcactgactacaaactgaacagacctacatgaactcagctgaactcaactccacttctccctgctctactcttaagtagcctctctttcctgtgtgtcctcatgagagcagggcatatgctatcgctgactcattctgtcaaatctttctccaatttgtcactttgtctgcccctcagttagatgtcagtgtttggggttaaaggtgtgtgctaaaggcgtgtctgtattccagccacagggattcaggctatgtgctaagggggttgtcaatattccagccagagtattaaaggtatgtactaaggttgtgtcagaattccatccagttcacacagagcaagagctttggatgttatcccttgccagagtagccatgttgctggattaaaattcctctatactgcccagctgggcagttccactcagtctctgatgaggctccactctatttggctgcaattggcttctctcaaaagtgtcttacttttatgttatctagtgatattgagccttttagttagtattaatacactctggtgccatatgataaagtcaaataataaagagcatctcagatcatgtcctgtatgtgatggtttaaaaggaaatggccaccatagactcacagggagtggcagtattaggaggtgtggtcttgtcggagttggcattggccttgttggagttagtggtcactgagggcaaagtttgagtctcagatgcttaagccacacccaagtgcgcatggcagtagtctttgtaaaacacattagaaatgtctgatttattcaaaatgtcaactaaaatatgtaaagtctgacaaaggtatattttcacagtagcttttgtgggatccattgtggtagctgaagttcgttggaggcttatctttctaatatacgttatattagaaaaagcaactgtatacctgattggctcaggaagtcagaatgttgaaactgccatagacaatgcagtcaagtgttcagaaaaaagctggttgatattttaaatccttttttactcattaatctccaactgctaaagacaaacaaaaagcaaaattaacatgattgtaaaccaagtgctgtgtcctgtacctagctttctggcctgctgagaaagaagttgatcagaggtagtgagtttgcttagaattgtggagcccaggctgcacagccagtgtctattatgaaacagtttcagaaacaggtgaatcccataagaaatcttgacttccatttgggaagaagcaagacttctacctccctgtcctctgagtttatgttaatcccctgagttctgggggaaatgattgctaccttgcttggtttggtgcatctcacatctcaacatacagaacaaagcctctgataatgaaacaaggttttgttttgttttgttggtttttgtttttgtttttgttttgttttcctttaaaaagtttcatgtattctgatctagccttaaatacaatggaaacaaggaagatatagaactcctggtcctcctgcctcttcctcctaagtgctggaattataggcatgcaccattatgcctaaatgctagcaagtttttttttaattaaaaaatattattcagagatgccttgagccttaccacataataacagaccaggaaaacccagaggtttgacattggaaatcttttaaacaacagacttttgagggctgccaagatgacataacaggtaaaagtgtttgacttgagttctattcctggaatccatacaaagttggcaggagacaaaaggtatcttcttaccacaacacatggacacccacaaataataaataatttttcatttaatttttcatatttgcattattttctatagatgtattttttttaattaatgtgggctagagagagatggctcagtgttttaaagcatggactgatcagagaggaattcctagcttctacatcaggcagttcacatccccctgaaacttcagggtgtcctatgttctctgctggcctccatgggctcctgcacgtgcatatatcctcacacagacacacatggatacacataaatgaaggtaaaaataattataaaaggcaaaacatgataggctcttcaattgttcaaattatgttcctagtttcatatatcctaggttcaggaaagtaaatagactcctgtcctccttcctctggaccaacttgacgttttaaaaagtggcaaattgtgtgaatacagccatcccttggtattaaggagctagtctgagagcctcttactggttccaacactaacactaagaggtgttcaagttccctctataaaatggcaccatatttgcatataacctacaaacatcatctcacatactttaaactatctatagattaattataaagcttaatgcaatttaaaatgctatgtaaatagagagtaatgccaaaaaaaaacttagaaagcaaagacagacacatctctgtgagttcaaggtcagtctggtttacatactgagttctgagctacagagtaagacgtgtctttaaaaaaaaaaagtagttttgagaatcacaagaaaaagatatgtacatcttcagtgtggatagaattttatcttgaataattaaaatacaaggttggttgaatctgaagatatagctggtggatctggaaaattgactacaactctaccagcaacaagaactttacattagaaaccagagacgtatgctaaaattcagtgctgagtgaataaaactgaaccacagaaggcaatctttcctctttgaggagacaatagactggatgaaggcagaagatgctgtaaagcgtcctccaaaattcacaatgaagaacgaagttgagcgaaagtaagctaagaggcttttaagaattgcaaggctggggtgtcactcctcctcctgatactagggcaacggtgcctgagcacagtaatattatggttgtgtagcaaagtgttcttattagatacgcatatcaaagtatttttaacgtttaaaattgggactgtgaataaggctcagtggataaagctgtttgctgccaagtctgaggaatcaattttgatcccagcgactgaaatggtgaaaagggagaacagaacagactctagaagtcatcctctgactccctgcaggctaaagtaagtgtactttacatttttttcttaaagaaaaagttcaaggttaacgtaaactttattttaaagttctagaagtcacaaagctagcaaataacaaaggtgggtctgcttcgaatcaaatcccagtctagcgacctcctgagctccattttgtcttctcataacctaccaaaatctgtactcccaaatcctgctaatatacagaatcctctcttttaggaagctattagtgactttcctccatgtttagatggtcctcttttggtcccccaatgacaactggaccccatctgtatttaaatagtgtatatatatattttctcatccactcgcaataaactcttgaggatacgaatctagttcctacagtgtgtaatacatacttctgcagcagcagaatatcactcatatttgaagtttttctccaccttttgatgggaaaactctgaacttgctcaggtcaaaccacagacctgcttttatgcatcaaacatggagcataaacaaactgacagaccagattttcaataaatactttgagtgaataaatgaataattcagaaagtaacctcctttcccgtgactgagtctcattccccaaacaaccgtgcttgactcttgggagaaaaagacagggtttgaaattacttttatcctttaacatttaaacattggtcattttctccctcattttcaccgtcataatcacacagaacatgattttcactatttgaaaatgtgaggtttgggggcagagcggtggaaatccttgggtttatcttacggctaactagtagcaattatgttcaacatctcagctaaatgccacaaagtcataaattgggacttggaggtggtactccgagggaaaagaatacaagttaagctgatttatttataagctttcttccctggattggttgtgttaaagtcgcaccttcttgggtgtgaccctcggtgacaaaaatcttctcaatgtgtacttattaagtctatgactttaagatgtgggataacggaagagttaaaatggtgttagggaaagcggtggttttttttctagatgcttttattgcagaaacaaggggaaattgacaaataaccttcccagaggtttgcctgaattgacaatcccacagaccagggagacctgacactctgacagatgcttttgctgcaagtccgctgaggtgggcgggtcccgggaactcaaggctgggtgggggtgtgcccgagggcgggcccagggctgcagggcggagccgcggaaggcgagaggcagcctgggaagtagcgccatattggcggtggccgcgctgtattgtcataaatagagccggttttgtggtgttttcactactcggttgaatgcctcggctgtagagagtggggaagtgagcgagctacaagcgagcgaagggaattggacagaggaaggaagagagggcaagaacaggaccccaaagcgaaagacactcgctggagagagacgcaggaagcgatgaaagagatgtctgcgtaagtgggggcggcggttgagggcgaggtggagagaggtgcgctgaggtgggcagccccggcttccagcccctgcgcctggcaccctgcgcagccggccgggacctctgctttccgctgccctccactccgcaagggcatctcccctacccgggactcacctggccgcccggcggggattcgggagtcgccgtcagccccccgccgcccgcctctgaggacgcccccagaccaggatgagggggaaaggcgcgtgtggctgaggagaaaaaacggtcggtcactctcctgccccagccgtgtctgagcccgtctattctgtctgcattggcgcaaataccatccccctgcctcccctcctcccggccggacccgctatctttcaggtctttcggagagggactgacctagcggagcccctaggtttgcggttgctccatgagaaaggctaaaccctctaccccgttccttcccaccgacccacaatatctaccgggctgtatctatcccctgctcacactttgataagtcggaagcagtttctgtacttgtcaagaatttattagaatttcttacctttcactttatccggaaataatttcaacgtacagaaaaatgcacagaaatacaaaacaccatttgtgtagccaccacccatttttccctaagactaacatggggtgtgttcttagctctttaacctttctttcttgaaaagaagtcgagcattccaatacatctgaagactcgcctatcctttctctgattgcattcacgacgctcttccaaggccccagagcactgagtttggtgtttcttgttactgcatttttaatgttgatagtacctatccctgtatccataaaaactgtgtacctgttttaaactgtttatagggtatttattatcagttactactctgtagactggttctttagaacatgatctctctgaccttttgctatgttaatattttcattattagttattttttattaactaatgtattccgtttataaacatagcccagtgtagtacttttagtgactattttgagctatttaaaagttttttatagaatgtcagtgagaattctatttacctatctttgtaccttcagtaacatttctgtaaggttttttttttttttccttgtaagtgaaattcataacactttttgagacctacttcttagagttcctgtttggtttgattttatgaaaatctgtctgtgccatgtattaatcacacactaatcttgctcagacaaccttatctctcatagacagacagacagacagacagatagatagatagaacttgaaataattaattgaagttttgtttgttctacagcaagataaaaatgggagagaaattagagttgggttttttaaaatactcccttatatttcattaagtcatttcaaaggtatataggctgtttgttgagatgaggtttcacatggccatgagcttgcttctgcctctaccacttgacttgtgccaccaaacctggctaagctatcttatcttctctattgtcctttctttctccccatcctgtaaaacctccagctgaaaaacatgttttagtttgtggacttacaagtcactgctgttttgttagttcggtttttggttcagagatggaactcagggcactacacatgaaacagtctgtcactgaggtacatctccaacctcaaggcaatttttaagcatttaaaatgcaaaaagaattaactacagttgtatttttgtggtgtttacattttaaattgataaacttgcacataatttgtacagtgactagtttaaagcaattggcttgtccatcacatttactgattacttatataaatatgtatactgtaattaattagtatttatcacagttgccctactgtgcttagaattaattatagagccaggcataacacagacctttaatccaaaccccatgaggcagaggcaggctgatctctgagttcaagtctggtaagttccaagacagagttatatagtaagaccctgtttcaagaagaaagaaagaagtcctagtgtccagttatacctttctttggtgagaaggtattgctatgtagctcaggctttgaatgtagattcttctacttcagccttctgaatgaagggaatagaggcatgggcctatgtctgtcccatttaacctccctcctttcttcctctgttattttttttttaaagagctaatttactcattaaaagactgccttttgagattatattcttactgttatgaatagttctttatgcaaatatgaagaaaggtggttaggttgagagtatatactcattttttcttttgcaacaaaatgtaccccatatcttttagttatagatgtagtcagaattctgtggtgctttattgaagattgtaattttatactagttaagggcaattaagggtcatttgagcccttcaaaatttgctgtttaatgtaaagaatttgataattattcagtgtgaaaatgatatgagttccaatctaaaatgaagaatactaagtacagtcacaaagtgttagaaatgtaaactcaggttccaggaaaagatgtttgtgaatgtaagtttctccagggactggttgaggtttctttttaaggctagatcatgttctgaggaccatttgatggatgttttgttcccttacttataggaagaccattgttttactaacagtgtctttcaagtgtttgacttcttttcaaagattctataacctagatagtatttgactcagcctgcagggaatagtagagggagccctggcataaagcccattcagggtctttgcagttgaactgagtggtgttgatacaattgtcttgattccaacacatactgctttgggcttgaaaagacatcctgaccatggaagctggaagctgtatgaaaaacacttcataaagacagaatacccgcctttccttttctttttctttctctttttaaaaatgacttccttggtaatgttcctcaaacttttaagtggctcaaataacttaagaggttcaatgtgtccatatgaaatgagacttaaaattttttcatcatttctttttcttgaacagaaacactatgctggacagccagcgtcaacagaagcattatggaattacctctccaattagtttggcatgtcctaaagaaattgatcatatttatacacagaagttaattgatgccatgaagccatttggagtatttgaagatgaggaagaattgaaccacaggtatatcattgaaactataaaatacttttacagtctactatttaatcattaactcatacatattgaatacccagtgatcactgccataaaaatgctccccaaaaaggaaaatcttagttctcttggaacttaaaattttaatatggattaaaaaagaagacttaactgtcaaataagtacaatgttaagcatgactgagtactagtgggaaaaataagtttgagggtagaagtcttttttttttttttttttggtttttcgagacagggtttctctgtgtagccctggctgtcctggaactcactttgtagaccaggctggcctcgaactcagaaatctgcctgcctctgcctcccaagtgctgggattaaaggcgtgggccaccatgccccgcctgagggtagaagtctttagagaagacctcattgaaaggaagggggcatgtgtatgtttgaaggaagtgtgctctgggcagaaagtctagggtgagtgtgtagttggtatatttgaggggtaggaagaagcttaggacaagggcaccttgtaaggcactataagattgtggaaattgaactcattagggttttgagaaggagattggcatgatctgactcgtgttttagcagttattctggtcattgtgttgggaatagtgtagaagggaagaggggtcagaggacaagagcggaaggaattaaaaggtcattataacagcccaggttggaagtaatgatacctgaaacctgaggatggcagtggaaataatagtgtagtctagatgtgttaaaggtagggttcttttaggacaaatagaagcagtttccaaagaggagtccaagattttcagtacctgcatcttactgaatggaattccattttctggggaagactgagacaggcaagtttggaagaatcaggagatagtttctcgtttataggatgcctaaacgcatctctctctctattgttcttttttaatgtgtttatgccattggttttaagtttaataatatcaaactgcattagttaagtactatttcataaaaattagccagtaattaacttacctattttaattatatataaccccagtaccagtgagagtaccagtgagagagaatctagtctctagtatcacaatgagttgatgtaattctgttgtaaagcggacttgacaattcagtttgcctctgtagcctgattgaaggtaacttagtgatttatattagattttttaatatttgaagacaattcaaagaccaatctattatcacatttatcatgtctggcactcttagatcttttagatgtatgaggtatcaacagatgtgatagcatgaacatatatatgatatgaatttaacagagcatcaacatcaagtttctacctgtgtgtttatttctttaatgttgtttaaaagtttaaagttctcatcttttattataggctggttgttcttggtaaattgaacaatttagtaaaagaatggatttctgacatcagtgaaagtaaggtaagattgaaactgcatagaattcattcactgtttttatttcagtatcatcctagcaatgatatgtaagagtcaagttatctgaaatactttaaaaaaagaccccgcatttctaaataatataaccttatatggtatatgactgtctacttttgtatctttagaaggatgctttttgccttgcttgcaaagggcagttttcttttcctttgtctttttgcagaatagtagtgtgtgccaggttgtgggcaaatgaaatacaagttcaatccattaattttgactatcatatcttaacaattatatcaaatctttatagaaacatttcattttaaataggtattataattttgtagctctccattttggtttacaataggttaactactggcttccaaattgaacatcagtaataacaaaaacaggctctctggcatacttgggaatagagtgatccagacaactggatttctaagtaaatgaggttctaacccagagatagccaattgtagtgacaagtctataaaaatgtctaatttgactcctatgtactagaccagagtttccaggttcaggagattttacttaagaagccagactttagatttacaatgtattccatctgacagcactgggcttgtttttgagtacaatacgaagaggcttggatgagatcgggttcctgttctccagcgcctcatggcccccaggatctgttttctatgtcatggtgactgccatttacctatgtttcctgtgtggaaatctcttagttgcacttactactcagacatagtttgcaagtcctagttcataattatggaactctcttagtttctgcctttttagagggttttggattatgagttttctttgttgttgcatgagtattttactgagtgtactaggatgaggttgggcatgttcaactaggtggtaaaactttttattagtcagcttcttatccctataactgattcctgagatggactacttaggaagaaaagattaagctagcaaacagcattggaggttcaggtccaagttcagacagctccaagctggggtggtagtgggaggcaggggcaacagagcgctgtgacaggagtggagtgagggtcagagcaagtgtcacactccacctaggaaataaccagtgaatccagcagcaccccctttgaggacacgcctctgtgacctaagatcctccacatcctagtcccagccacctagcctcttacagtccatactgccatcctagaaccaagcctgttagcatggaaccttgacgaaacactactcatagtgaaccatccatttatttgtccattcaccaagtggccctaaatcttacagtttaagcagtaagcagttttgtttgttcatacagtagtctcatcttttcccttaacagtgctcagtttaaagtaagtatctcagtattttctgttagaattttcagttagaattctctttttagttacaatgaatttgtaaggttggttcttttgacttagaataaggtaatgagacactaaagacttagactttagtcattaaatttaatttagtctttatgttatttacttttgttgccaaaagggtatctggctcatttcagatttgtcaggaagggttatatcagtagctaaggttgttggatacagtagattctggaggtaatcaaaaattcaactataacagctatcaagtagataaagtaaccagctactgtatcgatattatactgtcatttataaatattctaatttgggaaatagataactaaagggtttaagctaagtcaaagatcatttgatagttgttgagatactctagtatttttcacagataaaattatcttcaattctgtagttgtataaaaaataatgtatcctataataccacttcttataaaagatgtaggaatcatactttctttttctttttcttttttttttttaaatttatttattattatatgtaagtacactgtagctgtcttcagacactccagaagagggagtcagatcttgttacagatggttgtaagccaccatgtggttgctgggatttgaactctggaccttcagaagagcagtcgggtgctcttaaccactgagccatctcaccagcccctttctttttttttttaaggcagggtctcactatgtcactctgttacagaactctctattgtagaccatgctggccataaactcacagacatctgcctctgactgataccctttcaagtgataggattaaaagcattcaccactatcacacccagcaaggattttttttttcaacatagaaagtaaagtgatatttttttaatggtctggcttatttatcttttttattaatgtgagtcttaataattttattggctccttcctagctaaaattttgagattcttgaaacattactatgcattaaccagaggagtgactgtgtcttgttgtgcaggtcattttcttcaggttagtcaccagaactgtggctggggagataaaagaagagtagcagatccagttctcacctctgaccagtttaagtatggttgacaagctgagagttatatattagaaaggtatctctagaaagagagctcggttgatagagtgattgccacactagcataagggcctgaattcaaatccccagaacctgattaaaaataaataggtaaggctgggtatggtgtgcatgccgtcagtcccaggactcaggaggcagaagtaggtgaagctctataatttcaaggttggcctggtctataaagctactgaggatagccaggatacagagaaccttatctcaaataaaagcaaacaaagaaaatagctagataggtaggtagacagatagaataggtaggtaggtaggtaggtaggtaggtaggtaggtaggtaggtaggttgatagattatggcaccatactccttaacctcagctacagggtcagtgagagatcctgtccaaaaaaaggaacaagtgaagagtgatcaacaaagacacttgacttgacctctgaccttcattactcacacaagaacacacacactatacccacttacacacaacaagtaaatgtagtgtaaaataactttacagtttaatggcaaaggaacacaaaagaagaagcttattatagagttgaagataatcagggaatgctttgtagaaggaaatgaaacttaaaatgaactttgaaagatgggttgttaagaacactagctgctcttgcagaggaccccagttcaattcccagcacccatacagtggctcacagccacctgcctataactcctctttcaggggagctgatctgctgacctccacagggaccaggcacatacatgtctaacagacatacatacatttgagtaaaataaaataaaataatgaataaagaaaaaagtggatagtattaaggtactgatgggataagaaagtgagcattcaagagaaagacaatgacaagtgatgtgggaaggaggttaggtcatgaaataagttggcagtttaaacatgaggaaaggaagactataggagcacattgtggagatttttagtagcaagcccaagaattgatacttcagtggttgaggagaaaaatgcactggtggttggctttatgcaggtggctcataaaatagaataggtgagtatttacaacagtaagagaaggcgaggggcaagtgtgtagtttaggataataactcttataaacttgagaataaggggaataggaattgagaagagaagcaacatctgtgaggaatgtaaactaaaaatgtataaatgatactgactatggtaatgctggcctgtgatcccagcacttgggaagtaaagactggaatgttagaagtttgcacgaagccattctgggctactgggaagcctgtctcaaatacagaaaattcacccataaagggataatgatgatacattgggacagtaatgcctttagagaacagaaataatgaattagaagggctatctggtttttaccatagaagaatgtttaaagcatgggtattaaataaatcagaataaaagaagaaatatctaagccaggcatggtggcgcacgcctttaatcccagcacttgggaggcagaggcaggtggatctctgagttcgaggccagcctggtctacaaagtgagttccaggacagccagggctgtacagagaaaccctgtctcgaaaaaccaaaaaaaaaaaaaaaaaaagaagaagaagaagaagaagaaatatctagtaagcacttggaattggccctggaaagaggtagaagtaactttttaattatgatacaattaaagaaataaaagtgaaatctttccatttgttcttataaaatgctcccatcaagaatgacctcactctgaagaaggctaaaaagcatgtaacaaaaactaaagagaagacggggattggctgagacttttactggaaagagctgcagttcattaatttgatagttgagttccttaaaggggccttaaagtgcttttacacatctcttcaacaggattggcaaatgtacagtgtatcagttgtgcagtaaaagactggaaacttgtacatgttctttatgcaaagtaacttaaatgattgaatgccttttgctttattttagaatctcccaccttctgttgtggctactgttggtggtaaaattttcacatttggatcttacaggcttggagtacacaccaaaggtaattgctttttagttatgttctagtgataagaatttttaggaaactgttttacttgtttacaattagcgagtactgaacatagttcccatatcttactactgttaataaacactgtcttatactcatctttcatacctagttctgcatttatgtttatgtaaactttaatgaaaatataatttatcattcttaagaaataattttatttttttaggagctgatattgatgcactttgtgttgccccaagacatgtagagagatcagatttttttcagtccttttttgaaaaattgaaacatcaagatggcattagaaacttaagagtaagtatcttttgacatctcatattttgaacatagaaacagctataaaagcaaggacttagaattaatgacttatctccgagttgctgtatcttgctaatatcatgcataagcatcaggaacatggactttatagctctgtagacacacctgtagctctgagatctcagtcaagcagcgatctgtctgagcttggttttccatctataaaagtagagaattggtgataacataagctagtttcaaggatcagacaacttactgtaatatttgataagtgattgatgtatatccaattgtgggtgatatgtgtgaggctcagttaataactatgtgtatatctagcccttcattgacaagtaacatttccattctagcaaactataaaacactgacctcagttctaacaacataattttgtatatttataagtgtgtggaggttatcatatgggtgtgtgtttatggaggccacaggacaattttaggtatcatcctcaagacatgtctaccttctgtcagacagagcctcttattggcccagatcatctacaagggtacactttcactggtcagtaagccctaggaatggatcctcctacttcctccctaatgcactgttgtgccctgcgttaggatctgtggattgaactcttgtttcatgtctgcaggtcaagttctgagccagcccctaccatacttgtttgataaatatttttttaaaaattttacactactgcttttgagtctcatgcattccaggctcaaattcattgtgtagctaacaatgaccttgaactgttgatctgtctcctgagtaccaggactacaggagtgggtgaccatacattttatacttaatactttttgttaataatcaattttcagttaagacttcagatatgatatcaagataacaacagttctgctttagcatttctgacagatattcttaacaggataagttaaatagcaggcacaaatctgtatgacctaaataaaaggctaacccgtgtgtgttttttgtttttttgtcttcctcttttataggctgtagaagatgcttttgtacctgttataaaatttgaatttgatggtattgaagtaagtgtttaatatatttttaattgtacaattgaaatatttaacctgttagttttgtttcaaaatcagacttagcatgggcacattttatttggtttggtttgggtttgggtttgggtttggggttttgaaataatctcactagctgacctcctgagtgcttgcctggtactaaccacagtttaaagaatttaatagtagtcttttcaccttcttcttgtttctcttgaccactcatcaatggaaaacttgcaaacctccatttctttcctcatgctttttgtacaccacctttctcattcctataatcatcgaaaataattgcactattataattttgtttggagcagtgttgtatttacagtatcatcttaaaaacagtttcaaatctcagtattgattatactgacttactacaattcctttgccctataacaggtttttcacttgggagttagtgactgttcagtcggttgttatacttatgtctaacttacccagtcttctatggttgtcataatctcctttaagctaagacttaatcagcatcttgagggcaagcccgctgggtcttcgccctgttctcagctgagtgtggcccatcgtttgtgcacagctgtcatcctgtcgatctcactatgatcttcatggaagtttctctccctactctagaatttccttctttcttgatatactaccatcttactggagctcagccattgaatgccgaaataagaatttgttttccttatcttgcatgcttaaaaagcactgaatccatagttttgctgagtgcatcattctaggtaggaaatgattttttacatcctcaaaggcctgcgttgtcttgtggcctctgctgtaaaaaaagcatattactgttttgactctttctttgtgtagatggtcagttttgtctcttgttttatttagttgttttagttttattttgtctttatacttgtagaattcatgatgataatatgctttggtatgtgtttttaactgatatgcttggcatacaatagtcttttagaatgaaaaggccttcagttcttggaacttttattgagttcttttggattccctgcctttatttacacacaggtcttttttaatggaatcctaaaatttgtatgttgagtctccagagaacagctttctttaaaaataaataaataaaagcacacacatttttcctttacttaattaaccacatcttaatattttaattcttcttcttgttttttccctgtctttcaagctttgtaataatatccactaccctgtttttagtttctaaaaatactaattatattttctaaatgttcttttaaatttatctatgtatttattcatagctacctgtttttattccccaaataaaatgtttaaatcttaggtcactgggcctgttagcatttgcccgtgtgctctccagcctccatgacttttgctgatgtttctattgtctgtttcctagtggattatgccataaactctaagaaaactgaacccaaaccaaaacatttcccagtatcttagttgagtttcaagagaagtaaatgtgtgttgtatcttccatctttatttcaagatattcaatgattgccccatattaggtcacctacataggcctcctgatgttttagtagactatcccaaactaataattggaactttttatgtttggagttagggtcggggagaatggaccaggagaagtaagtaaatcattctcttttcttttttatctctttccaaagattgatctagtctttgcaagactggcaatacaaaccatatcagataatttagacctaagagatgactctcgcctgagaagccttgatatacggtgcattagaagtttaaatggtaagttcctataaagaaatcttagattcctgcttgaaaacagtttggtaaatagggcctgtagttgtagacaattaattgattaatgtgctctaaagattgtcctggcagcagaagttcctcactacctgctccaatgttctggattccctaatgaaagacacaaacacagctttatattttaatatgctttaatcagctcaatggtggaactacttccaaacctccacatggctagcaattctcccctttgatattcctaaattattacttattaaaacctatattccatcctggctaccctggcctgcaaccctccattactcttacttgttggctgtctctctgtcctgcacttctcaagcctaatctttctgcttcccaggcatggtagttctatcctttcttctctctctatccccttgctgagaatcctaaagtcttgcctctccctgcccagccatcactgggctcctgcaactttatttaccaatcagaaccaaccgggggcagagaccctcagcatcttacatgtgggattcttgtgcagtttggggagcccagttaccataatacaagcattaaaccaaatccacaacaagagcccttttatggaattgttaatggactattttaaagacttgagcaaactaaaaacctaagagcagcatggagtatagctcagtgttagagcacaggcttagtgtgctccaacactgcatttcatcaccaacagcagaaatcttaaagtcctggttttcttcataaaaatagtatgattaattatttttaaattcttgaaagattatgtttagagttgtggttcataaacatattggtctcagaaggcctgtaaacctagaagatttattgagaactccaaaatattttttcatctggattatatgtcaatatttatcatattatgaataaaaatgtttagaatatttataattcactagaagtaaaaatcaattataaattaataattttatatataagatggtcttttttccagattaccctatcttcttctatagttaacatattatctaatatcttgtttttattaaactataaaaagaaataggattattctatcacattaatatctagtgatctcgtccttttgcctttgcctggctttttgttgttgttgttgttatatttttggtttttgggtgtttgtttttaactgtcatactctggctatttggaaaatgttagttcacaaagttatttttatcttcaaaatgttaacacagatttcattataagtgggttttaaattatattgattaattaatattagcaccagagatgctaatattaatgagagtctttaaagttttataagctatcaggttcacaatagtagataaaagtgatttataactaatttaacttgaaagcttacctcttatccacagtaaatagtatcattgttttccttgaggcaaggaatttagtttatttttcagagactactgaatgcccagttgtgtaaccttttttatctttagtcataatttcaagcaacccagtatttgttgaaaataaggctattttagcatgcagctgaaatgatgatacaccactttccttttggttgcttttgtttaactgggagcctatgagagtagtgaagtgtgttgtacacttgtatactttgttgccactgctgtgtttgacctctaaggtaacactgtagttgtcaatgctccaccaaggcaaacgttagcacacagtgaaaatggtaaggaatgatagaggcttcttaaaaagtaggtttacccttacaggttcttcaggtttaagagccagtgatctataggctcctttctttacactgttgtttgtttgtttgtttgtttgtttgtttgtttgtttgtttgtttgaaacgtggtttttctgtggaactcactcttagaccagcctggcctcaaactcggagatctaccttcctttacctcaagagtgctgagatttaagtcaagcaccaccatacccagcttattttattttatgtgatagtaaattacacttctttgtgaaaaggtttctattaagaaaattttataacttggagacattatgattaaatcagatacacaggagacccatctgtttttcagttgagagtctgaaggttaggagaccatttgaattaactgagttttaacgccttagtgaaaaatcaatgttttgtctttttcaggatgtagagttactgatgaaattttgcacttagtgccaaataaagaaacttttagactcaccctaagagcagtcaaattatgggcaaagcgtaagtatcccaagtcctttatgtgtctttttaaattttctgttgccagtaattgaaacacatatgaaaactctgaccttattgatgttgttgagggttgatggtctgtaaacttagaaaagcattacacctgttctcaggtgtaatggtttatgtgtgtctctctctctgtatgtatgtgcctatgtatacatacatatatacatatatatgagtgtgagtgtgtttgtgtatagcttataaaatgccctttgcctagttctgatctgatataggacattctgtattatttatcactatagtcagacagtgcttgacgatggggagatgagggctgaagcaatggctcaatgataagaccacttggtacatggtctgagtttgagtccccagcacacgtgcaaaaggtgagacatggctgtgtgtgcctgtatcagtaacgtcagcactggagagctagaaacaggagggtctctgaggcttgctgcctgcctagtaccctagcttcaggttcattgagataaagctcaagggaatcagtgagggagagatagaacaagatacccagaggcctcctctgccctacatgtgcatgtacctgtatacacatggtcaacaagactagataatctcatacacacgattttaaaagtaaaataagaatgatgatacagtctgaaaaatgaatcaataggtgattttgtacctatgaaacaaatagaatgtactcacatacacgtagttggtacagtctaccgtttatctcagctttgtggaaagctattgaccctaaactgaaaacctatataaagccttttacctgaataatgtaggcctttgtaacacagtgctaagtactttcatatagaagatacctagataaaacaacatatagcaaaaacacaaagtatggtttagatgagagacatgataaatggaaattgctgaaggcagagttgatcttagtgagtcagcgagtgattgcagatgtttgggacattaatatccactactgtagactttatgactcactgacttataaaaagtgttttctttcttcaataatatatttaacttactgtaattttttaaacttaaattttaaaaaaaatttaattcctttgtaataacacaagttgggcatggtggcaagccaataattccagtgtccagtagactgaagttggagggtcacatattcaagaccagcaaaactttgtcttaaaaaacaaaacccatttatgcaggcaggaatgatggtttccaccaatgttcccaggtactcaaaatgaggatgatcactggactagctcatgaattagaagccagcttcctttccagtccaacattgctctcaattttcttgttttttttttctttcctggtgtttccttttctcttacctcttcttcagctatgcattttttcatctccattataatgaattttaagtgactgccattatatatgtggttgttccttgactgacatcattacttggctcatgactatactgaagcaactaaggaactgaatttttaaatttgtgttttatttcattggtattaaaattgaatgattcccaagaaaggtaaaataatgttcatttaaaaatcttgtcacagcactattactgaggctatggagcactcacaaaattggatctatcatgactgccctctgaaagacccaacaagtagctgaaagagtcagatacaactatttgcacccaaccaatggacagaagcagctgacccctgttgttgaattagggaaggctgaaagaagctgaggaaaagggtgatcctataggaggaccagcagtctcaatgaatctggacctccgagatctttcaaacactggactaccaaacagacagcatacactagctgatatgaggcccccaacacacatacaatagaggacttccaagtctgtgttcattcagagatgatgcacctaaccctcaagagactgggagttttgaggtcagatgggatggagggtgggggcattcatgtggagacagggtgtggtaggaggaggtgtgggatgtggagcaattgaagggtgggaggggaggggcgggaaatggaatatggagtataaaaaattaattacaaataaaattaaattttaaaaaatcttgtcacatatatcatattcctaatagctaaaagagtaaacacaagtcacatattcatactctgatgaatgaatataaaaacatggcatatccttgctgtcagatactgttttgcaataaaatggaatgcagtactggtaaatgatacaaaatatatgaatgttgacaccacttaaagtatggcagaagttacccaaaagtcaacatgcataggctttgatttatatgaagatgtccataattaggagagatgtataagatagaaagtaggtgagtggtggtttaggtctccaggtccagaaaagggagtggtgtgactggttgggtttctttggagatgatgaactatcctagacatggttgtggggttgcacaactctgaatataccaaaaggtgttaaactgtatagtttaaatgaatcagtcttacggtgtgaagtttgcggggaaaagatagccatgtgctgcttgtggccaccatattgaacagtggaagacttaaatgagtgtttaagcaggtgatttttgcctgtggccttaaataggataatgtaatttgtattgaaaggataacatgaacaatttatctctctttataaatcaaacactgtatttttcaattttacatgcatagtttttatgtttaaatggccaaactgacatttttgtaggatttaccccttctttgtgtgagacataaaataatagcacattgtgtaataagggcatattaatattaggcttaatgtgatatggtagtagttttccataaatttttataaaaatatcatttcacaggtaagtctaatatcattcatatattcttcacaatggggacttatccaatttctatgaaatcctgatgtttgttgccaattttgtgattggtttttaaaatactcctcatgtatacaattgttagtgaaatgttctttcttacctacttacgtccagatgtctttccttctgtttatttctctctttaactccagatacttggggggaggtggggacacttaggaataatttcagtagaattattcaggatggttggtggtaaagcagggaactgaggtctttgtatgtacattagggaacagggcagagagccagaagtagaaaccaaggtttgctgacctactctgagcctagtgtttgggttctgctaatcatttcacttttgtgtttagttttatgaatgaagttatcctgttgtgtttcaaatataatagatctgaataataattaacaaatattcgtatttctaggccgtggtatttattccaatatgctgggattccttggtggtgtctcctgggcaatgctagttgccagaacttgccaactgtacccaaatgcagcagcttcaactttagttcacaagttttttttagttttttccaaatggtaagcatatatattttgactaattgttaacttctatgaatgtgtaaaaaaaacttttgaaattttaaaaactatagccaggcatagtggtttctgccatgagagctttaagtagggctattgccatgagtttgaggacaacctgggctccattgtctattttagtactggctatagagagaaatcttaaggaaaacaaacctatgcatagataactgtgttgttttacattcattaaaagctttaagatgtatttatctgaggatgggacagccacatgacacactttcctttctttttataactgatatataaaattgtatatacttatgaggtgcccacgatattttggtagtgtacattatacagtcagatcaaggttagcatgtgtgtctcctcagaccttaacctttttcatttctttttggtgaacacagtctcttagcttgttgaaatccatagtacaactaacattacttatagtcatcctcctgtgcaacagaacaccaaaacttacctactttaatatccattgcctgacattgtcctctccttctctatcctggtctccgctagctactagtctacttccaccttctatgaggccaacatttcagatttctctaatgagtgaaggaaaatcctgtgccttgtttatttcagttaatgtcatggcctccaataccatccattttatcacaaatgacataattttgttgtggctccttggctgtccctcccctcccttccactccccaccaatgttttggaaaaaggctttaactgtagcccaagcttaaatacaacttgaattcctctttcttcagccttccaagtattgggatcacagatgtgtaccaccacacctagttttgactcttttttttcccccttttttgattttattttatgtatatgagtgtattgttatatctgttcaacacttgtgtgcctggtacctatagaggtcagaagagtacattaagtcccctggaacagtagttacaattgtgagccctccatgtagatgctggatttgggccttggtcctctcgatattattaagttatttatttactttacatcctaatcacagcttctcctcctccctctcctcagaaaaggggaggcctcccgtggatatcgaccagccttggcaatgtcaagttgcagtaggactaggcacatcttctattaaggctagacaaggcagtccagttgggaaaagggatccaaaggcaggcagttgagtcagagacagcccctgctcctgctattacaagtcccacatggagacccagctgcacatctgctctatatgtctgtcccgtgatgctctctgacaatcagtgctcataacccctgtacctcttaagtaagtcagcaaggcggcacttgagtttgtgaatgagccttatcatagtaacagccccataccatagatttgggctttgtacattaagctcacctaggaaaatggagatgataatcatagctgcttcattcatgtgctggtatttttagcaaatgttagttttagttattgctgttactataccatcagaatcaaatctgtaaaagcagatgagaagggaggttcaggttgctttaactaacaaaagactggttggcgtttctgaggaagggcaaataaacagactcttccttgtacattgtacgttgtcatgtgaagattgggacaagttaatacttttaatatttttatatggcatctgaagtgtttgtgaattaatttactttattcatgttagggaatggccaaatcctgtgctgttgaagcaaccagaagaaagcaacttgaacttgcctgtctgggatcctcgggtaggaaaatttattatggaattttatttaatcatttagaagttggacctttctctaaatcgtagttcaaatgttatgtcattaaaaattgttcatataagaccagataagtggttgtatcaaaacagtatcataatccattgtaaaaaaactgattcacaagtagttgcttataataaggtactgaaatatataaaaataatactttgtagtacagcttaaagcagataattctcacatagcttccaatttaataaaataggtacttatttctatataaatttgaagataatgtctctagttattatacttcaataattctgaaaaactattgcttctaagttgcatcatttaatagctttactgaggaaaaattctgcagaattctgacaaataaatatgtctgacttcaggaagaaatgcagttcagaagagaaatatacttcctagaattgagagagtttagtattaaatttatatttcatattcttcataatttaggggaaataaagtgaggactactaaatagaagaataggtaattattctgcttctaatttcataggtaaatccgtcagacaggtatcatcttatgccaataattacccctgcctacccacaacagaattctacatataatgtgtctacatcaactcgaacagtaatggtagaagaatttaaacaaggtaaatatgcttggccctgttgtcccttacatattcccaagattttagtagacagttgtattctgtattggtagctattgattgtcagaattctgtaacccttaattctttttaaaacttcaaatgctttccaaaataatattaatcctgagttcgactcctagcaacctcatggtggctcacagccatctgtaatgggatctgatgccctcttctggtgtgtccgaaggcagctacagtgaacttctatacataaaataaataaatagttatttaaaaaaaaaaaggccaaaaattgaaccagtccaatatggtagaatttaacctttatgttctcagaaacagcattgtgtatttacattttctaagtcaagcacttgttgggttagatggtttgggtggaatgacacaaagctaggcacttttcaaaattagacctagtttctaaaaacccattgtttttttctttttgtttaggtcttgcagttacagatgaaattcttcaagggaaatcagattggtccaaactattagagccaccaaatttctttcaaaaatacaggtatctaaacttttataattttgttatatatgtatctggggaaaaataactttttgtcatatttatgatttttgtttgttttttttacatcttctatttttaagggggttaggttgtgtttgcctgtgggcatgcacgcacatttggaggacaggacaacttgcaggggttagatctgccttctgtagactgtgtgggtcttagggatcaaactcaggtcagcagacttggtaacaagtgcctttacctgctaactcattttgctggacccttgctttgttcttaagacagaggctcactctgtattccaggctgacctcaaacttactttgtaacataggttggcctggaactcatggtgattctcctgcctgatgagtggtaggattttaggtgtaagccagcacatgtccaatagggctttaaatatagaaagcaaattatgataggtgacagtgtctcacattgcttaagcaaggtagagaataggcagtagaaatcttgagtggtcagggccctcagtctagcagtggctagtctagcatcagtgatagttgttaaagtgagctgtttcttaattgtggagtctatagttttgtaaaaatagagtaatctgtagctttcagaaactgtgtagttatattgtttagttctttgcaaagaagaaagaaaacagataaaaaaaactcagactaacagatgtttctggctgttttcctccttgatcatgctgtaaatcccatatagacattatatagtactgactgccagtgcatcaacagaagagaaccatctagaatggtaagacttatatttcacattctttcatgtctgatgataacaatggttaaacaatgccacaccaattataaaatagtgtcttgcttggctttcaaaatcagtgtatttcattagtgactgacatacatgatggggcatcggggattatgtcattgagttcagcatcaccagtgatagaaggcagtagaagcagatttttcttgctatttttcagagtcagatttaagcaaacttttgaagtattctgcagctcactattattgttcccccatcaaactcaaaaaggaagaagacactttgtgtatcttcttaacctaggtgatggcacacatgtcagaattttaaatcttctgacaatagacagtagttttggtcaacgacactatgtctttgagtgtatgtaaattcatcctctgtgctgccagtgtgttgtcactcctggaccactaggtaagagatgtgctacctgtgacgcatcttccagtctgaccttttgtttcgagggcttttacttctctggcaatttgattgttttattgatgaactatttgtcaggaaactacagtatagtagtttctagtagttactagtatagggcagtccttcattaatatgttgctgaatgttactctttgctatatagcaaagtaaatagttacacagagactataccactcaaaaaccactgtttggtacataatagaaaaaggtgacttctcatttaagtagcaacactacagttaagtagattttcatgcatctcttctgaaacacaaatgtaacgtcagcttctgtaagtgaaaatgtcaaagtattcttgaaattattctgacttatagtcactataaatacatagctgacagttatatattttaagtgagagaaaattaagttgtagaaatctggcaaaacctgtttgtttttgtgatagctgatatacatttagtgactttttgaaatgcaaaatccagtattttgtgaaaatcagtctgcttctttcaggagttaagtgcctacattagctgttcttgttcatattacatgtaaaggtatgaaactagaaaagattgaagaccacattaaataacagcttttgcttatactcaagtcctgactattagagccttaaccaagactgggtattgttagattcagaaatacatgaaatttagatcagttctttttaagcagaaagtcacttaaatctgacatttgtctgattgatgtcttactttattattactattactattgctgtgtgtgtgagagtgtgctcatgccccagcatgtatatgaatattatgagacagccttcagcagtggttctctccttccgctgtgactccagggctcagttcgggttatcagccttgcatagcaaatgctttgacctgttatgagccatattgctgccccatttggtatttttaaaaatcccttctataattagactatcttcttaagtgaacatataaagcttcatagttgctgtattacttggtttacttcagtatagcttgtcaaactttatatgacttcatagaactcttgttgtatatctcagggttggattagtagaatctaaaatccgtgtacttgttggaaacttggaacggaatgaatttattactcttgcccatgtgaatccccagtcattcccaggaaataaagaacatcataaagcgtaagttgtccctaaatgcatttttaaaatattattatttgacatatgtattgtttcaaatgagttttaagactgtccttaacaggtattggtggaagaatgatatatgtttcaaatatgagtgatcatgtatttattatttatatatttatgtatttattatttataagtatacactgcagtagttagtaaacttcagcaaaaactttatattagtttttggaacatcatctaagtggtcaacaaacctcagtaccacttaatcttcttttaaaacagtattatatagctacaccagtgttctggatgtggttttaagaattttgtcacatctctaaaatctattaataaggtagagaaatagaaaccaagtttaattgtccagtagcatttgttagactgaaaaaaattaatggaaatttttaaattttactttatagcaacaattacgtatcaatgtggttccttgggataatttttcggagagtagaaaatgcagaaagtgttaacatagacttgacatatgatatccagtcatttactgatacaggtaagactttgcaatcatcgggctatgactgtaactcagtttcatctgtttagggtgtagatggagatagtctctaattcccgatttagttaaattaaatggtacccctgttatagaaattgatgctgctgtttaggaaaaggaaagaaatgatgaagcagttttcaacataataaagcattgcagagtaatggacttacagagggttgcgacatttatgcaagagccatacttaacaagcttacaagtgcagaggatatctctggcaggattttttttttttttttttttcctttttaaaggtagtgctggctgcttagtctgggaaccatcagtgtgcctaggggacagaagggagaagacccgagatactcctaagtcagttacatgttgtaaaatacatcttaatgtgttttctattttaaaataaaactaaacctctcaggtgactttcttgtttgttcagacaaagtttataattgaggtccatattttttatgtttttcatcttaaataattatccgaatatacagaaatgttttttaaaacgtctcaagatacagaagatgctgaaaatgtttcaagagtaatagaaaaagaaattgtccttcataactagtgccagccacatctctctggaatatctgttataaattgggctagtattggcctgtagtagtatgcacattcatgttgttactaccttggcacatatgagttttctaaattctttttagctagtcctcatgtttattgtggtaatgtagattccttttcttcaccttcaaacaactaaatatcactctgagaaaggaacccaagaatctgcaatttgaactagtactcctgataatcataagcagtctccagtgaaattatgaatataaattgggatcatatgtcttaaaaaggagaacactgagatattctgctaataagattttcaaataatcttttccacatgtgcacactcatgccctatgtcatagtatttgcattgagaaatagcccttctctccctgtcttcagtggacttaaaatctaaatggctagacacaaactaccttaattttggtaatacaactggtctttacctgttttgaaaagcactagaacagaaatctagagccatatatcttgggatgcatcaaggttttccaggctttgtaagacaaatcttccacctatacactttagatttgcagatgctgaattcccataataaaacaggctcggggtagaaggagaagttgaattgcatttggagttgtagagacaacttagagatttagagttctggctactctcccgggagtctttccccagcacacctgtgtgtgtgtgtgtgtgtgtgtgtgtgtgtgtgtgtgtgtgtgtgtaagaaaaaagaaaaaacattatcttagactcagacaagtaattatgaagaaagattgcctttttgaaaatagtaaacaagatttggagggaaaataattgctacatatttactttgttaataagggttgtctgtaagaaaacttttagatgatatacacatagaaccaatcaattcttaaatagtattataacacaatggaaattttagaaatatctgttcccacaagagggtgtggttttagtggggcatagaggtttatatatttcagaaaaggaaaacagcttgtggttcagaaagaaattttttctttatcatattaacatttttacagtgtacaggcaggcaaacaatataaatatgctgaaggatgggatgaaaattgaagcaactcatgtaaagaaaaagcagcttcatcattacctaccagcagagattcttcaaaagaagaaaaaggtgagtgtgttactgtaactctccactatgcttccattcataccgttgatcttgagaccaaatttgaattttatacctcttctaaccctgtttggaaagaggatgtagacagtcagtctgaaatctcatttatcacaaaaataatatgcttttgtgttcttcggaactgaaggtagtctctgtattctcatttgtttttgaaactctaacagccttttttctcttttggcagagtctttctgatgtaagtcggagttcagggggccttcagtccaaaagatcatctctggatagcacttgtctggatagctccagagacactgacagtggaacaccttttaactctccggtgtctgcaaataagccttccaacccagacagccccacaggagaaatagaaaggtatgggccagaactgtcctttcagtctgtttactgaaggataatgagaactttctgttcctttcctaaaagacctgttctcattattcagagatttttctcttgctagctactagtttcttgtttaggaatgcttgacagtttgtgtagtgctgcaggggttgccccatgattaagaacttacggagtcgtgctgtatagatggatgtacagattttctgcttcaccaccttatctgacattttctgttcttcttgtgagtaaggttgaaatactagaaagaagtaatgttaaaatgttaaaggtgagagctttaaatccataagaggaaataaactaatactgataactttacatgtttcctaggagtagtgctgagcctgtggctgtggttgtggagaagctgccaagtgtccccccagctcaggggctgtccattccagtcattggtgcaagtaggtatctcagctcctgccactgcatagtgacaatcccactgcagaaatacttgatcactaaacttgtttttgcttttcagaggttgaccctacagcaaaagctgtatcctccccagctgtgtgcaccattcctactgtagtaggacggaatgttattcctagaatcacaacaccccacaaccctgtccagggacaaccacatctaaatgggatatcaaatattactaagaatgttacacccaaaagatcccattcgccacctacagatgggacttctaagaggctgaaagacatagaaaaggtaacattatgccttcaatggtgatcacgccttttgttttgttttgttttgtaagttaaaataatagtaaagaaaccaacaatttgttctgtttaaaagtattttaaacccttaagaaacaataattgttcatctcgatttaaaatcactgaggtctgaagtctgcttgattggtatacatttcttgatttacacaaaaactaagtaattagtgatgaccatagtgttcatactgttttttcttttatgtgatcttctctgcttccagtagatggtaataaaatatattttgttagaatctgaatggatttaaccaaaaagatcacttcagttgcaaaaattaagggtagcagttgaactcagtctcaatttagttgtagttaattgaagtcttaaattattgtagtttctgatggtagactaataagcttcttggtttatatagattgtagtatctttccagttacataatagcaactcatttttactgtttctattttagttcattcgacttgagtcagcatttaaggagtcccgggctgccgaggatcggaaaagaaaaccaatggtaaatgagttggcgttgtctcaaacatgagcttaaagagcagtagtgtgagaaatatagaggaagtgtttcagtcttcaggtattcagggttctaagtaggaataagttttgtatacagaaagaaaatttaaacctgtatttttaattcttctgtttttaggattcgattggtggagaatctatgcctattccaactattgatacggcacgcaaaaaggtaatagatgataatatctctatgggtaaaaacaagtacaaaaaaatgtattaagaaactaaaactaaatccaagtatttagaagaccgaggcaggaggattgcttcaagtttaagtctagcctgagctacagagttaaaaccctgttgaaaagaaacaaaaacctaggatcagaaaaggatatgattatgtccttgttctgagagacaggcaatgtggttcattaggactgcaaatgacaaatagcttatagttctcagtgggcattcctcaaagtctagaaaagagaaaatgagttaagaagacttgtgacaaaggatggaccatccagagactaccccacccggggatccatcccataatcagccacaaaacgcagacactattgcatatgccagcaagattttggtgaaaggaccctgatatagctctctcttgtgaggctgtgccagtgcctggcgaatacagaagtggatgctcacagtcatctattggatggaacacagggccctcaattgaggagctagagaaagtacccaaggagctgaagggatctgcaaccctgtaggtggaacaacagtatgaactaaccagtacccccagagcttgtgtctctagctgtatatgtatcagaagatggtctagtcggccatcagtggaaagagaggccccttagccttgcaaactttatatatcccagtacaggggaacaccagggccaagaagtgggagtgggtgggtaggggagcagggtgggggagggtataggggactttcgggatagcatttgaaatgtaaaggaagaaaatatctaataaaaaattgaaaaaaaaaagaaagacttgtgacttacttagatttaaatctgtcatatttatctatgaacagttgtttgctcagcacaggagtttcttactaatgccagagatagctgttgttatataaatggctttcaaattttaagttattagaattcaaatatattggggctagagagatggctcagaggttaagaggttaagactgctcttccagaagttctgagtcaattcccagcagccacatggtggctcacagccatctgtaatgggacctgatgccctctcctggtgtgtctgaagacagctacagtgcattcatatacataaaataaatcttaaaaaaaaagaaatcaaatatatttgtatttagaggagccaaatgtagcactgtatgcagagaatacctttagaatgtgagctaaaaagattctagcattgaattttaaaattgactctgtgaagcattaccattaactaataaacagaatattattaggcatggaaagccaaggaaggaactgtgtacagagtatgggagcccttctctgagactgtgtttcacgcctccaaagaggaaagcgcactcccttataatcagcgttggctttgtcagaccttttcaaaacacagtaatatgtttatggacagtttcagttacaaaagtcacgctgtaagactgttacagaaatatttacgaaatatgataatccaagaaaatattggagtggatgttaaaatacaaaacagtgaatggcatgactgtgctttaaagactttcaagttcggccagggggtgatgcatgtttttactcccagcatctgagttccagaccagccagaaaacatagaaagaaacatgttaaaaacaaaacaaaaacaaaaaactagaatgatcaagtgtgagtacagttgtatattgtctggtttgcttatgctagatgcattttattgccctattctatcttttgtatgcctgaactttttaccaatcatttacttacttgtttatggtgctggggattaaacgcagaactccatgccacactagtggcctaccactgaccacatcctctgcaagttaactattgacgaggtttatattgtttctattacacaatctaaaagctgattgaggacatagctctcagggagcagatcttcctgttagtcctcaactttaatcaccatcacttgctcagtgtcagtgcccagctgtgagaaagaagggctgagttgtttactctttactcagtggagactgagctagccctcttctccagcatcctcctcaccttgctgctgcttctactcttccctattgctcctcttcttagttctgactgtcttaaaaaatgcccaagagcaaaatgaatgaataagggaagaggaaggagatgtcaagcacacatgagtggtaggagccattatggtagggtgtgtgtgtgtgtgtgcgcgcacgcgctttctctctcactctctagaattcaagtgcatgggcatttacacacttttttgtctctctctttctcatagagactacccagtaaagaactcccagattcatcatctccagttccagcaaacaacatccgtgtcatcaaaaactcgatccgcctgacccttaatcggtaatagcagtgcctcttcacttaggtgagcatgcgtcatgcagtgcatcgatggcagccagtcttcaaagtagaaccagctgccatacagataggtgacagggacagtcgtcagcctaatgacctaggagtggtttttgaactctcacactggaaccctgagatgacgtagcagtctctcactggttgccgagtccactctgaggatacctgccagtaaatgtcacctacagtgttatggctttgcattttgaggttttactgccttaactttggatgtttgttgtttctctgttatgggaaccagttcttggtcacttggactctgataaaaacaagtcctgaactgttttgtttggttttttttttttttgttttttgtttttagtgttatgttgtaatcattgtatagagctgaaaaagttaaaaaacaaacaaaaaaaagcccttctcttgtaattttccaaatgtttatgtgtttactttagcattgaagccactttgtgaaacctgagattaatgaatgtgagatatcttttctgcttccttcatttgtgtagatatctattttgtttatttaaattattttttccaaactggcacatgaatatttaaactattttttgtgcttttgtccaaatgttgcgtagttaccaaggaggattagtccagtgactgactacacaagagttgggcaccataaatgttttgcctcccatggaggccttcaaaatgcatctttattaaaaatcaaactataaccaggatactgaaagtcagtatatgaatggtgaaattgttacatatcttactatctcatggcattcttgttagctgattggtattttttacagaggaagaattcattctgccatcaatgataagatccctttaagtatagcagacttgtatttttgaagtataaaagtaactcagcatggtaattgctcaccataactccccacagtcgccaacagtttcttcatggattaggcatgcagaaataagcagtggattttattgaaacctcaaggcatttctgaatgacattgttaccaaccattaattggctcaggacctttgtagtttttatttaactatatgagttgtctttttttacactgcttttttcagtgcatttcttaatattttttaagtttcatgaatgcatgctcagtttatgaaaaatccacaaccatgtaattcttgtaatctgttgactccgtgttttgtaaatgaagccgtatgtattttcagagtatttttgtatgtactgtaagatatcatcttttcaaagagaaactttaaaacctttactgtctgtctttaattttttaaatacacctaattaatatatttaaaatggaacgcggatgcatagccaggaatgctgtgcatgccaccttcagctttcactcagtgctcatcaggtgcagaggtggggggtgggggtagggggatgtacactgaagctagagttagtggagcaatagcaaaccattttcacttgcaaacctttaccacccatattaaattcctaagttttgattgtcagagttctgtatcttccctctcctgatctgtgggtgtctgaaaggcaggttatagtgtttaatatatacaaaagaaaaatggaaaaaatttgctgaaagcagatggcaagagctgaaaaagaagggctgtcctgctacctacattctctatcaaaggccacggggagtctcagcttccttggcaaagctaaatgtttgggatttgttcttcagatactctagagtgtgaagctgaagattatgagaggactgtcacctgactgtgaacctacgaagatgacttggtgtggggcctgactaaatcttaggtctgagaaagaagcctatggcactatggtagctttgttcttacaccaagagtccattcaccatggttagtagtgcagcaccagaatctacaaagagggacttacttcatcagctagtctggcagctgaggaattagatgggtctgatatggtgggctattcagaagtgaaagcttccttccctgactggtaagggagacttcgtacatttcattacgattgtagggggtgtctggaacggttccaagtaagtaaaaaggtgtgggatttagttgtgtttgctggctgttttcacgtgcatagctgtagctagaaatgtattctataaaaccaaataacctgcagctcttagacaaatgttcgttttcctaaggtactggactttaatctgctcatttttcagagactgttctggagactaacacaggaaaacatacccggaagcttccgcttttgagaattgaaccaatttgaggtagagagtacttggtttaacatcttataaaactggaagaattaatttttaaagtttactgatgcttaaaataagtctaattttgtctgaagactgccattcagttagtaaaaggcttactaattttgcaattaagtgaaaatggacagtgtctaactaacaggccaatttttttttccacagcatcccccaaaatctcaccttgtaaccttgctggcttagatcatgctggcttacagctttgggtgagcctccttcctcagcacctggcttgtctcttggttttgaaaggggaatttctggcttgagggtcatgagtacctgacaatcctttggaattgtgtataaggtttcgtgcatttttccagtcaaaggaagttagctttcatcggtttctcagactagtccatgccctcaaaaaggaggctgaggattgaaaccatcaagattgaacagtgctagaatatttataatttactcatttgattttgctgcagtagatttctaaatggaaggtggctctttaacaaggtaggttatgatggcctcagaaatactgtattcattgggttctttataaaccctgggtgaagcttagcgaggttgctatttaggaaactgtactatcagctttcctttgctaacttagactcattagcaaggtcactcagaatagagtagcttagaatgagcctcaaagatgatagaaaaataaagatcagaaccctttaagctccatgcattcaagctctcacttgctcctccaagtttgttgttcaggccagaacatactaaacttaccaataaatataaatgctatagtttttttacatatatattttgtataaacaaatttatgtttaaatcagtaactacctagtaaatcatacaaagcttgggatttgtgcagatggttgaaggaaatcagtctcactaatgacaactgttccttaggactttctaagggaattttataaggtcctttccaagttttctgttttggaaacaatctaataattttgtatttgaatttaattgaacacaagattatcaaatttgttaaaatgttttaaagacttatttttgattatgtgattgtgggtgtgtaatgtgagtgcagtgcccacagaggccagaaaaggatacctgaagaacccctgaagctgaagtcatagctgttgtaagctgctcaacatgggtgctgggaaccaaacttaggtcctctggaagagcagtcagaattcttcactgctgagtcatctctctagcctctaaatgtgttaaaattttaacctgacttttgaaaagacccatatagaatatctttgatggccatggtgctgcatcacaccacagtgtttgtacagtggctgcagctggatagttgtgtggtacttgttagttttgtcttattttataattgtatacatgagcttcatttgtctggaataagtaatctaataaacgttctttgataaatagatgatgtttgagtgatattatttgggagtattttagaactaccagaacactatatacttatttcttaaactgacatccatccagtcaattatgacttaggttgtttatggtagaaaatggcatttcctagctacttaataggaaagcaaagctcagactaagtttacttcacacacaatcatttaatagcaatatttagtagcaaactgtaataatttgcaaatatgatctaaatttaaagaggtgccagcctcctgtcgtttagggtggccttgtgcatactttcatcaaggggatccttgaggcatctgtcaagtgttgaagatgctgtcactctgggaaccggaagcctccagttgaaaacagaagcgtcagtaatcagcactgggtactactcctagaatcacaagttacataaggacttcatatgctcttacatcgcccttggtaaaaattgacggtaagcctgtctctattgtacctcttatcacttaaatgattcagacttatgtaacactaatttcacatatttgtttggtgtttatcattgcaatagaaagcaaactaacacaacctttgttcaagaatctgtctatagaggttggctggggatgtgccccagctgatggagtgtatgtctatcatgcaggaagccatgagcttgatcctggtggcacacacctacaatcctaccactaggaaggtggaggctggagaatcagaagttggaaggcatccttggctatacagttccaggccagcctgggcaacatccttctctcatgggaaaaacaatagccgtcctgtagagaaaacttaagaggacagtgaagaagaaaacactccaaagaaggaagcagagtttgtttaatttcaaaacaattaatttaaagaaagacttcatggactaagatgcaagaaagcaaacaaaacttagaggccattaaaatgggtttctcgggctggtgagatggctcagtgggtaagagcattgttcctgcagtaaaaattattatgtactaatattagttctggactctataactctcattgattaagcatttgctaagggccctttacaacactggcaagccttgtccaatcaggaagcactactatgttacaaatgaggaaactaaggtctggtgagacaatttgaccatctctaaatgctaactattcagaagcacactccagaagtatctccaagctaggaagaaaactagaagtgagtgtcaagccccagtgacagtaccctgccccacagagcaacagaccatactaagtgtagcatccctaagcttatcatcagatctatatactagcataagtagaagggatcttcccactcaacaaatgtattcccatggagcagctgggagacgcacctacagcaggggctctcaggatgtcaagtctcaacacacctgcagaccttgccctgtgaacctctgtccctccagtcagcctagcaacatgaatttccccacactggccagacacggcttagcagttccatgttcaagaggaaccctttcgtcaattctaccatatccactagctctgctcttaaccatttgctccacttgagcaaattttaacacaccactgttcttcagttcaactttgacccactctgagcactgatgcactctgcccaatattaaaatgtcccaactaatgatttttttttgtagcatattggcttttgttttgtttttttgagacagtttctctgtacagtcttggctgtcctggaactcactctgtaaatcagcctggtgtgcgccaccaccagcatgctaggacttttaaaaatatagtaaatagctgtatatgtgcttgtgtgggtgccagggatagaacttatgtcttcaggttttactagcttagccattttgacaatcttaatgtaaataaaatactgaactgacccctcccacaaaaatgagggaggacagcatgtgaatgaacgcttcatctgtggtaataagaaatcagaacatatctaaaactgcacagtgtacactagcatacatatgtcatttagaaggttacatgtgtactcacactcagaaaacagagacaggaagatcatgagttcaaaaccagtccagactatatagcaagaccctgtgtcatatttatataagccaataaaataagtatatgaataaaacatgtactgataatcataaatgtattttaaacaactcttgatatacatgtaattttaccatttattaacgatgaatgcaaatatgcatgctaataggatagatatgcttgcttatgttttctgtaatgaactaggctctgaagctggtaagatggctcagtggataaagcacttgctgcacgaatgtgagggactgagttcaaatcccaagacccagctgtagcagcatcatatgtccgcaatgccaggacaccagtgcatttaagatggctgtagtttactaaagtgtgcagtgggaacaccaatgcctttcctgaaatgagagcagtgtagtgactctctagcgtcattatacttggtaggcactatgaagtactgtacaatctaattcatctctcttgtttctgtcttctaaaagtagtggttataataaaaggctctacttttaaaaagtagctcaatgaatcaaaagaagaaatccaacagttcctggcacttagcagaatccaacgaatcacgaccagagacatatgaaataacatggcacttgattgacagtggacagctcctctccaagaaatccagcccgaggatcaagaaaaaaggccaacatcccagccacctccatcccaacatagccagcctaggcagtagagtgccacctcccatgagatgctcttgccttgtgttgtgagaattttccctggcaagttggaggtggggaactagccaacatctacttcctctccacctcacaaggtcccaatgacaaactagggtagagctctgccaagattcactctggaagagctgatcatttaatccgcttacgaatggactaaggcattacaagcaggagagtaggtgacttaagacagccatcctggaatccgtgcaggaagtgtgcatgactcttctgccatgcccagcacctccctgaggccacatgtaattggggaggaattgcaatcaattggttggtaaggatcccatgaccccaacccccacactcagtcttctatgtgggaacaacgatcaacaggtccagctgtgatgatcttttgccaagtaggcacagctgaactcaggcagaggctggcactcagcctgaagggtacgcctgaacaccttgtcacccagcctttcagaaaacagctgctggatttgtaggaaaaaaagaaagtagaactcatgaattattacaaagttcactatctatatattacaacgggttagagaacttagcaaactacctgtaccagccagcacagcacccagaacgtccggctgagccgatgcttcaacagagtttaacattctgcaatgtaaacatctgtatgttgacatccccacttctgatccaactnnnnnnnnnnnnnnnnnnnnnnnnnnnnnnnnnnnnnnnnnnnnnnnnnnnnnnnnnnnnnnnnnnnnnnnnnnnnnnnnnnnnnnnnnnnnnnnnnnnnnnnnnnnnnnnnnnnnnnnnnnnnnnnnnnnnnnnnntttatagcagttcaaagaactaagttcaggttctttccaaataggttggtttcttgaaactcaccaacaagtcaaacatcagaaaagtggggatttctgaacaccacccacttggatggtaactgatatttagtagtttcaaatattaagaaaagaaaaaaaattgaccttgattaggcagtatctaatctcccagggcacaggaaatgaaagcgagcaagtctgatttgcaggaggccctgaggttgcacaaagtagtggctcccccagcaaggcccactcacggcctgcctccagctgaacacccagagggaaagcaccattaaactccctataaattcagcaaccaaacagttgtaccatggtgagggggtggggaaagggaagaaggaagagagggtatcataggtttgagaaggctatgctgttggggccagagggattcagtggtcaaccagcctacttattccatatatgtttaggatgaatgttctggaaactagatagcattggaaggaccagttgaaagtactggatgtgtttggctggaaaagtaatcagagctccactttccatggatgctggagggaaggagaggcccagagatgaggttgctgttatgatccacctaagagatgttagaggaaaccaagctggcaaaacaagttttgagagattttgagggggtgggagggaggatgggctctgccatcaaaatacatgatgggaagagtggaagatgatgcacacctttcttaggcaaacactgccatcactgagcaactgtgagaacagcagaggaggctgggaagcaaggctcctgacttcagattagtagtgttgaatcagcgctgtctggcacccccatgtggtcatccgtgacaggtcaggagaaatgctgctgcagagcggctagatttcagcaccagtcaccatccttccagatcactgtggggattcccagctccaggaacaggcttctgcagaagaaattcttggctggttgaacccttactgcaacccacagccaaagtgggtttacctaattggccatttgggggatgacatcagagcatgcacagacctgcccctggcctttctctttagatctttctggtcatgccctcagtggactgtggagcaagcccacttgaagctgacccaaaatcatgtctctgatcaagtctcttctcaatagttggatgtgaatctttgcctcctgcaaactgaggggcaaaaaaagaaaaagttaaagtcttgatcaccagattgctagcccccacgttagcatatgctagctaatttgctgtactttctccctcctcagcattctgagcaggtggctaggcctattctgtctaacacaaggtcaaagcaggggctacggattcctggggggcagggcgaggtggggggtactgtgagaggatggagagacttgcccctggagctgagagagaaaatatcagccaagtgtccaagggctaggatccgggtgctattgtgtcactgcagccttaaagagcacagcagtagacacagttaggagggctgacccagggtcaagcagaaaatgcctttgctctaatcatcaaggctattgacctgtgaacctggactcaaccggaccagggaacatctctgcagccctcagtgagaaccaaagctcaatggatttgcctaagcagagatcccagagagagccttggcacacttctggccacaggagatataatggctaatctttgtggtcagcttgactggatttagcatcaccatggaagcacacccctgagtgtacctgtgaacatggcttccaaaaagtttaactgaagaagggagacctaccctggatatgggtagcattaagcccagggactgagtgaagagagagctggctgagcaccactctgcttcctggctgtactgcctacaactatactaaccatctcaaactcccgctaccttgtctgcccagaagtcaaaataagcccgctttaagtgggttttggtttgctttgctttgggtttttttttgtttgctttgttgttggtggtggtggtcagatatttagtctcagcaacaagaaaagaagttaatacaggaggatactcaacaattagtgaggttaatttcctgccagctcagtgtcagactgaagttgacttacagccaagaagactgttatttccttcacatcagagttggaaaactaaaattctgagctgcagtagcatttacaaaacataggcttgctggggtggtgcaggggagggcagatgctctgaagcatgggacagccagcagagcctgggcagtctcagactgggggtagctaaggaaagaacacaaccatcctggcagtaataaagagactcggacagtgtgctctgtagaatccctgtggccatcaacttctgaagcaatgatccccaaagaacaggaatttccccccaggaatcccatacgttgagggaagaaaatggctgaagactggtgcccacatgccagaagaggaatttggttcccagaaagacatttcactgagttcccacaacttatcaccttgcaggagagacagcccgaagcccagacagccatgggcagtgccacccttcagcagaatggcctgtctcaggctaagcataaatctgtgcatcgggacccagaaaacggtccttggggatttcctggtccttgttatttgctcctcttcccaatgtggctacgttgaaaaaaaatttcttttctatgcttctctgtcagttgtttaattggcttcttgagggcagctggccaagcctagcccattagggcttccagagacccagctctcccctccagtgactggggaggctgaagagatgaagttaaaactgttgagactaaagcagcaacagcacccacatgctgcggagagggtggggtgcggtgaacatacagcacctgcctatgatgtgtgaggctctaagctccatcctcagtactgcaaaaagaaggaggaaatgctgcagaggtcaaattgaagaaagcactgcagccatatgacctggcatttaagaggtcgagggtgactgtagcagagcccgctatggaggaggaagctgcacaaggaataaaggtcacattctcaagaaaaacgaggaggaaggaaggaaggaagagagatcaaaggtctaagatcaaggtggaagatttatttttaaattaggagatttctgaacatgccttgaagctgagtgatggaaggcacataggtagacattttaggaacacacgtatgtgctgagggaccaggtcggaagaggagctgcagtatgggaagagaggaagatgtgtggacagtctccaagacttgcgcaatgatctcctggtgttcatgctctgtataatcccctggaagagtcaaacttgctgactcacttctaacagtgtcgcacaagcaatagcatgccacttctgatattagattatagagactgtagcttccagccttggccctgcccttccccttgggtcactcaccctgaagcagtggttgccatgctgaaagacacttagagaaacaaagactctgtgagtctttctataaaggaggtaactgcactcttatggtcctgaaggcaaggaaagacgctcctctggaaagcaggacatgggagccagatctttcataggaatctgatgttcctggcaaaatagctgatttgtaaccagtgctcaggacatagcaaagccaacaatgctaagatcaaaagtgtgctgaacaaaatgggtaaagaagtctgggatgctttcatgataaaagttttgg

SEQ ID NO: 1396 - DNA, 3755 bp, Mus musculus
ggcagcctgggaagtagcgccatattggcggtggccgcgctgtattgtcataaatagagccggttttgtggtgttttcactactcggttgaatgcctcggctgtagagagtggggaagtgagcgagctacaagcgagcgaagggaattggacagaggaaggaagagagggcaagaacaggaccccaaagcgaaagacactcgctggagagagacgcaggaagcgatgaaagagatgtctgcaaacactatgctggacagccagcgtcaacagaagcattatggaattacctctccaattagtttggcatgtcctaaagaaattgatcatatttatacacagaagttaattgatgccatgaagccatttggagtatttgaagatgaggaagaattgaaccacaggctggttgttcttggtaaattgaacaatttagtaaaagaatggatttctgacatcagtgaaagtaagaatctcccaccttctgttgtggctactgttggtggtaaaattttcacatttggatcttacaggcttggagtacacaccaaaggagctgatattgatgcactttgtgttgccccaagacatgtagagagatcagatttttttcagtccttttttgaaaaattgaaacatcaagatggcattagaaacttaagagctgtagaagatgcttttgtacctgttataaaatttgaatttgatggtattgaaattgatctagtctttgcaagactggcaatacaaaccatatcagataatttagacctaagagatgactctcgcctgagaagccttgatatacggtgcattagaagtttaaatggatgtagagttactgatgaaattttgcacttagtgccaaataaagaaacttttagactcaccctaagagcagtcaaattatgggcaaagcgccgtggtatttattccaatatgctgggattccttggtggtgtctcctgggcaatgctagttgccagaacttgccaactgtacccaaatgcagcagcttcaactttagttcacaagttttttttagttttttccaaatgggaatggccaaatcctgtgctgttgaagcaaccagaagaaagcaacttgaacttgcctgtctgggatcctcgggtaaatccgtcagacaggtatcatcttatgccaataattacccctgcctacccacaacagaattctacatataatgtgtctacatcaactcgaacagtaatggtagaagaatttaaacaaggtcttgcagttacagatgaaattcttcaagggaaatcagattggtccaaactattagagccaccaaatttctttcaaaaatacagacattatatagtactgactgccagtgcatcaacagaagagaaccatctagaatgggttggattagtagaatctaaaatccgtgtacttgttggaaacttggaacggaatgaatttattactcttgcccatgtgaatccccagtcattcccaggaaataaagaacatcataaagccaacaattacgtatcaatgtggttccttgggataatttttcggagagtagaaaatgcagaaagtgttaacatagacttgacatatgatatccagtcatttactgatacagtgtacaggcaggcaaacaatataaatatgctgaaggatgggatgaaaattgaagcaactcatgtaaagaaaaagcagcttcatcattacctaccagcagagattcttcaaaagaagaaaaagagtctttctgatgtaagtcggagttcagggggccttcagtccaaaagatcatctctggatagcacttgtctggatagctccagagacactgacagtggaacaccttttaactctccggtgtctgcaaataagccttccaacccagacagccccacaggagaaatagaaaggagtagtgctgagcctgtggctgtggttgtggagaagctgccaagtgtccccccagctcaggggctgtccattccagtcattggtgcaaaggttgaccctacagcaaaagctgtatcctccccagctgtgtgcaccattcctactgtagtaggacggaatgttattcctagaatcacaacaccccacaaccctgtccagggacaaccacatctaaatgggatatcaaatattactaagaatgttacacccaaaagatcccattcgccacctacagatgggacttctaagaggctgaaagacatagaaaagttcattcgacttgagtcagcatttaaggagtcccgggctgccgaggatcggaaaagaaaaccaatggattcgattggtggagaatctatgcctattccaactattgatacggcacgcaaaaagagactacccagtaaagaactcccagattcatcatctccagttccagcaaacaacatccgtgtcatcaaaaactcgatccgcctgacccttaatcggtaatagcagtgcctcttcacttaggtgagcatgcgtcatgcagtgcatcgatggcagccagtcttcaaagtagaaccagctgccatacagataggtgacagggacagtcgtcagcctaatgacctaggagtggtttttgaactctcacactggaaccctgagatgacgtagcagtctctcactggttgccgagtccactctgaggatacctgccagtaaatgtcacctacagtgttatggctttgcattttgaggttttactgccttaactttggatgtttgttgtttctctgttatgggaaccagttcttggtcacttggactctgataaaaacaagtcctgaactgttttgtttggttttttttttttttgttttttgtttttagtgttatgttgtaatcattgtatagagctgaaaaagttaaaaaacaaacaaaaaaaagcccttctcttgtaattttccaaatgtttatgtgtttactttagcattgaagccactttgtgaaacctgagattaatgaatgtgagatatcttttctgcttccttcatttgtgtagatatctattttgtttatttaaattattttttccaaactggcacatgaatatttaaactattttttgtgcttttgtccaaatgttgcgtagttaccaaggaggattagtccagtgactgactacacaagagttgggcaccataaatgttttgcctcccatggaggccttcaaaatgcatctttattaaaaatcaaactataaccaggatactgaaagtcagtatatgaatggtgaaattgttacatatcttactatctcatggcattcttgttagctgattggtattttttacagaggaagaattcattctgccatcaatgataagatccctttaagtatagcagacttgtatttttgaagtataaaagtaactcagcatggtaattgctcaccataactccccacagtcgccaacagtttcttcatggattaggcatgcagaaataagcagtggattttattgaaacctcaaggcatttctgaatgacattgttaccaaccattaattggctcaggacctttgtagtttttatttaactatatgagttgtctttttttacactgcttttttcagtgcatttcttaatattttttaagtttcatgaatgcatgctcagtttatgaaaaatccacaaccatgtaattcttgtaatctgttgactccgtgttttgtaaatgaagccgtatgtattttcagagtatttttgtatgtactgtaagatatcatcttttcaaagagaaactttaaaaccttt

SEQ ID NO: 1397 - protein, 739 aa, Mus musculus
MKEMSANTMLDSQRQQKHYGITSPISLACPKEIDHIYTQKLIDAMKPFGVFEDEEELNHRLVVLGKLNNLVKEWISDISESKNLPPSVVATVGGKIFTFGSYRLGVHTKGADIDALCVAPRHVERSDFFQSFFEKLKHQDGIRNLRAVEDAFVPVIKFEFDGIEIDLVFARLAIQTISDNLDLRDDSRLRSLDIRCIRSLNGCRVTDEILHLVPNKETFRLTLRAVKLWAKRRGIYSNMLGFLGGVSWAMLVARTCQLYPNAAASTLVHKFFLVFSKWEWPNPVLLKQPEESNLNLPVWDPRVNPSDRYHLMPIITPAYPQQNSTYNVSTSTRTVMVEEFKQGLAVTDEILQGKSDWSKLLEPPNFFQKYRHYIVLTASASTEENHLEWVGLVESKIRVLVGNLERNEFITLAHVNPQSFPGNKEHHKANNYVSMWFLGIIFRRVENAESVNIDLTYDIQSFTDTVYRQANNINMLKDGMKIEATHVKKKQLHHYLPAEILQKKKKSLSDVSRSSGGLQSKRSSLDSTCLDSSRDTDSGTPFNSPVSANKPSNPDSPTGEIERSSAEPVAVVVEKLPSVPPAQGLSIPVIGAKVDPTAKAVSSPAVCTIPTVVGRNVIPRITTPHNPVQGQPHLNGISNITKNVTPKRSHSPPTDGTSKRLKDIEKFIRLESAFKESRAAEDRKRKPMDSIGGESMPIPTIDTARKKRLPSKELPDSSSPVPANNIRVIKNSIRLTLNR

SEQ ID NO: 1398 - DNA, 62719 bp, Homo sapiens
caactcaggagccctcaggggctgaagacccactcatctcatcccatacttgtcaattttcagatcctggggtccgggcccagcccatactgaagtccgaggggaatggatggatgagcagaaatactcagggggccgtaggcaggtgagagattattttattcagcagtagctgtcatcgacagctttctcacgctgtctctctcacactgtccaccctgtctcagctgcttgagttggcagcttccacacacagctgtgtggccggctctcctttgccttcagggcaacagcttgttctctctctcggcacaagcaagcagagctgtatcctggctccctcctgtctgtctgcaagacggacacctttggctgtctctctctttctctgggccccagagcacctgccatgtcaagccatgttgagccaagccgagccctaagggctcctatacagcattagcagggcaattatatcttttacagacaacagtggctcagagctaagtatgaatttacacaaacaggttatacaataagtggaggtgtgtgcctgcacaccaaactcaactgagtcaagtgggccggacgtctgcctcagcctatccttgaccaaagaacatttatataccttacactctacccccctgtcacagggggctaaaagaaaagtttgttgacagtccttttaggaattgcaacacttggatgtcctttcctcttctgacacccttagtggtggttctgaggtctcaacgaggcacaaattagccatctaagtataaaaccttaaaggagagagtccttttcctagcaatcctactcacattagaaacatggcttcagctatcactctaccttccccattctactctgctcctccctcacaattttataagaattctactacatttctgagatttcactactgccagctttattcttttttattttatctggatctgatgtcctaccattaaaatttttattgggagtccaggtgcagtggctcatggctgtaatcccagcactttgggaggctgaggcaggtggatcacttgagcccaagagttagagaccagcatgggcaacatagggagatctcatctctacaaaaactaaaaaactaaaaataaataaaaaaaattagcctggcatggttgcacatgtgtggtcccagctacccttggaggctgaggtgggaggattacttgagccacggaggcagaggttgcagtaagccataatcacaccactgcactccaggaagaccttgtctcaaaaagaaaaattggttggggatccacatcaatttctgacaacatccagctcagctcctatttgttcaaaatcgaccaagtaagaccagacatgaatcctcttggagcccatttaacaatatgtatttttcattttatttgggttgttcaaagtgagtagggattcccttcatggttgccacccattgtgcaacagggcttgggatgaatttcacatggtcattcagcttgagttaaggaacaggctttaatggagaaacatacaagccaagggtcaccaagagaggacatagtcgcagactctcccatcatcccagagggttgctaaggctatgtgctatatgtgttccaatggaaggatgtgtgccccctgagatgacaccctcttaaaatgtgtcagaatgtggacacagagactatttagagccagcgtggctgagtttagctgccagctgtttagttgtctgggaaagccagcaacccagcagaaagccatcctgggagaagctaagtgcaggctccctcctgttgatagaaggggagaccttagccccacctggcacaacatgcaggcaaccctagcactagctcccaagattgtttttggaggatcctactgtcaagtaggatcaccacgcttttctattcattctttaaaaagtgctcacagcccaccatattgacctgctaatgaccagtgcaagcaataccatgctacaataatctgccgaaaaaaagaaattctccaagtcaatgaaagagtccagagatgaaaaagtttcaatggagtaattgtataacattcagacacatcagaatatttattaagttagtgagggagaaggcaaggtagacatagtctatcagttggggcaaaagatggagaaatgatgagataaaggcagatataagagagaaaataatagttgaattcattcaatgaatatttattgagcagctgtgctaagttctgaggatgacccagtgtacaagactgagatggtccctgtcctacagacaagtaaacaacccagtagatagttacaaaagttaagataatttttttttttttttgagatgcagtttcactcttgttgcccaagctggagtacaatggcatgatctcggttcactgcaacctctgcgtccccggttcaagcaattcttctgcctcagcctcccaagtagctgggattacaggcatgagccaccatgcctggctaattttgtatttttagtagagatgaggttttaccatgttgatcaggctggtctcgaactcctgtcctcaggtgatccccctaccttggcctcccaaagtgctgggattacaggtgtgaaccaccacgcccagccaagataataatttttaaagatttttctccatgaattacttgtactaacattttaacattcttccatgttgcaattctgtttatctgaatgaacttttaaaaaataaaagagccaatgaatggaatagaagcagtaatactttttatagcagaacaacaacaaaaaagaatgtatctaatctttaaaaaaatactcagaaaaaaagaatgtttagcttgttctgtacacatttctaggaaaaaggcctaatttggaggaatttttaaacttcaaaaataagaatttcactgggcacactggctaatgcctgtaaccccagcatttcaggaggctgaggtgggagaatcacttgaggccaggaattcaaaactagcctgggcagcatggcaagaccggtccctactaaaaatgaaaaaaaaaaaaattaaccaggcatggtggtgtgcacctatagtcttagctactctggaggctgagtcaggagaatctgaggcaagaagatcgcttgagtcccagttgttaaggctgcagtgagccatgatcatgccactgcactccagcctggccagcaaagcaagaccctgtctcaaaaaaggaagaatctttacaatgtctaagatacaacagctaataataaaacatctatcaagctctgaagaaaatgttatcatgtagtagaagggcattttcaaataagccagaagaaaatgtatcccttttctgaataagctgccattctagagcaggaaatgatcaaaagaaaaaattcaagaataggaaagttgtagctggaagagattggcagtgagcactgaaaacagttcatctgtagagatgagtgttgataattagttatatatacatatacatagttataccaataggaaaatggacaaaatatatgaataggcaatccacagagtaagaaatataaatggctggtaaaatatgaaagatattcaccactggtaaaatatgaaagatgctcacctttcaccactgatgagggatctgcaagttaaaatcacaaagaaatagcattctccaacctgtcagattgattttttaaatttttaaaaactactggctgggctccgtggctcacacctgtaatcccaacactttgggagactgaggcaagcagatcacctgaggtcaggagttcaagaccaacctggctaacatggagaaaccccatttctactaaaaatacaaaaattagctgggcatggtggcaggcgcctgtaatcccagctacttgggaggctgaggtggaagaatcgcttgaacctggaaggtggaggttgcagtgagccaagatcatgccactacactccagcctgggcgacagagtgagactctacctcaaagaaaaaaaaaaattaatagaaccagccgcttgacagaggcatttattggccaaagttgggacgattttagcatcaaaagaacaatgcctgtaacaaattgaaacacactgactatataaaaatccatgagtcgggccaggtgcgatgactcacacctgtaatcccccagcactttgggaggcagaggtgggcagatcacttgaggtcaggagtttgagaccagtgtggccaatatggcaaaaacctatctctactaaaaatacaaacttagccaggcatgttgacacatgcctgtactcccagctactcaggagactgaggagggagaatcacttgaacctgggaggcggaggttgcagtgagccgagattgtgccattgcactccagcctgggcaacagagctagactctgtctcaaataaataaataaatatccctgtgtccatagaatacttaaaaattaaaaaaagaggaggaggagtaaaacaagcaagcaaataaacgaaaacttttctacaggtggccattccaccaagttcttatctgaaaggggaaagaattaggttatttgcagtaacctattgcggagtagcctaatagcgcagttgatgagcaagagcccttctttcctgaaaaaggctagctatcaatgtagacagaattgaaaaaaaaaaaaacacaatttgcaatccctagggaaataattaattaagccacgaattgtcaatggatgctgaaacaattaggtgaaaggttggggagctgtatatttatctggtgctaaagttatcaccctgcagtttactaaggagttctaagatgattgtcaccacacagacccagtgatcaatcttaatatcattaataatgggataaacagagcttcactatgtgccttccagtatgatgcagtatttagcctgaatctaatcaagcctttagatccaacttccattaatagaaaatactgaggttattgttaaatgacaccacaaggaaacaaccagaaacatctagaagttggaacattctaaggaaatactagtctactctctacaaatcaatgtcacaggaaaaataaaaagctagggagaaagtctgttctagattaaaatatatttcaggatgttgataatggaggaggctatgcatgtcttgggggaggcagcacatgggaaatacttgtttttttctcaattttgctatgaacctaaaactgctcttaaaaaataaagcccttttttttttttttttttttctgagacagtctcgctctgtcgcccaggctggagtgcagtggtacagtggtgcgatctcagctcactgcaacctccacctctcgagctcaagcaattctcctgcctcagcctcccaagtagctgggattacaggcacctgccaccacgcccagctaattaaaaaatacttttaaggaaaaaaaagccatttcagagacccaacaaccaaatgcaatcatacttcttgattggatcacactataaacaagcttggtgcaaaagatatttgggcaacaagtggaaatacttgagtgtattaatattattatggttgtacaggaaagtgttctcattagatatgcatatcaaaatatttaggagtaaaattttatgtgtttacttaaaaagatttcactgaaaaatgtgtgaaacatgaccaaatgctaaaaaaattctacatgatgggtatatggtgttaattatattattctctctactttttctgtatatttatagtttttttataagcataaaaactttttttttaaatagagttgtggttttgcagttgtccaggctggtctcaactcctgagcttaagggatcctcctgccttagtctcctaaagtactgggattgcaaccataagccaccacaaccagccaaattaaaaagttgttttttgggtttttttgtttgtttgtttttgagacgaagtttcactcttgttgccctggctggaatgcgatggcgagatctcggctcaccgcaacctccgcctcctgggttcaagccattctccagcctcggcctccagagtagctgagattacaggcacccaccaccacacccagctaatttttttgtatttttagtagagacggggtttcaccatgttggccaggctggtctcgaactcctgacctcaagtgatcaacccacctcggcctcccaaagtgctgggattgcaggtgtgagccactgtacctggccaaaagttgcttttatggttggttttttgttttttgttttgttttggtttggttttttttttgagacagtatccctctgttacccaggctggagtgtactggctcactgcaacttccacttccgggttcactcaattcttgtgcctcagcctcccaactggctgggattacagacgtgcactaccatgaccagctaatttttgtatttttagtagaggtcaggtttcaccctgttggccaggatggtctggaactcctggcctcaagtgattcacgcgcttcagcctctcaaaatgctgggattacaggccggagccaccacgtggagccaccatgtccagccataaaaaaaaaaaaaaaaagatatttggccaggtgcagtggctcatgcgtgtaatcctagcactttgggaggccaaggagggtggatcacatgaggtcaggagtttgagaccagcctggtcaacatggcaaaaccccgtctctactaaaaatacaaaaacttagcccagcgtggcagtgggcacctgtaatcccagctagtcgggaggctaaggcaggagaatcgcttgaacccaggggacggaggttgcaatgagccaagatcgcgccattgcactccagcctgggcaacaagaacgaaactctgtctcaaaataataataataataataataatacccagtatttgtgaatgtttgagaaaacagatcatcacatacatattggagcatatactggtataaacttctaagaggacaatttcaagtatataaattttattttacaatatacatgtcagcggggcgaggtagctcgcgcctgtaatcccagcactttaagaggcctaggcggatacatcacttgaggaaaggagtttgagaccaacctagctaacatggtgaaactccatctctactaaaaatacaaaaattagccaggtatggtagcgcgcacctgtaatcccagccactggggaggctgaggcaggagaatggcttcaacccaggagatggacattgcagtgagccaagatcacagcactgcactccagcttgggcaacagagggagagtctgtctcaaaaataaaatacaggccgggcacggtggctcacgcctgtaatctcagcactttgggaggccgaggcaggcggatcacctgaggtcaggagttcaagaccagcctggccaacatggcaaaatgctgtctctactaaaaatacaaaaattagctgggcatagtggcgggcacctgtaaacccagctactcaggaggctgaggcaggggaatcactcgaaaccggaaggtggaggttgcagtgagctgagatcacatcactgcactccagcctgggcaagagatggaaaggagggacagacgtccgctctttttttttatgcgcatgggttagttttgtcatttgaaaatttttaacttaacaaatacagttacaatatacactgcaaataagaaaaatgtccttattgaaattggggttgggaaaaatacagtatccttattgagatgggggttagggactgtcattaaatcccaggtagattaacaaagacaggaaaatgggaagaaaagcaattgattaaaacaccgtggccgggcatggtggctcacgcctgtaatcccagcactttgggaggctgaggctggcggatcacgaggtcaggagttcaagactagcctgaccaatatggtgaaaccctgtctgtactaaaaatacaaaaattaggctggaagcggtggctcacgcctgtaatcccagcactttgggaggctgagatgtgcggccaacatggtgaaagtccatctctaaaatacaaaaaattagccaggcgtggtggcgcacgcctgtagtcccagctactcgggaggctgagacaggagaatcatttgaacccaggaggcagaggatgcagtgagccaagatcatgccactgtgctgcagcctaggtgacagagcaagactccatctcaaaaataaataaataaataaataataaaacactgcttggctgggtgtggtggctcacatctgtaatcctagcactttgggaagccgaggtgggcggattacctgatgtcaggagtttgagactagctggcccacatggtgaaaccccgtctgtactaaaaatacaaaaatatagctggacgtggtggtgcatgcctgtaatcccacctactcaggaggctgagcagagatcacgccactgcaccccagcctgggcaacagagcgagactccatctcaaaaaaacctctgcctctcaggttcacgcaattctcctgcctcaccctgctgagtagccgggatcacaggcgcaccacgcacccagctagtttttctatttttagtagagatggggtttcaccatgttggccaggctggtctcgaactcctgacctcaagtgatccacccgcctcagcctcccaaaatgttaggattacaggtgtgatccaccacaccaggccacatcaggtttttgttgttgcttttaagtagagatgggtttttgccatgttggccaggctggtcttaatagaactcatggcctcaagtgatccaccagccttggcgtcacaaagcactgggattgcaggcaagagccactgcaccttgctcaggttttcaaaaatatgttttgtagtttttatttatttatttatttatttatttttttgagacagggtctccttctatcactctggctggaatgcagtggtgccatcctggtttcctgcagcctccacgtcctggactcaaagagatcctcccaccccagcctcctgagtagctgggactacaggcatgggccaccatgcccagctaatttttttaaaactttttgtagtgacagggtctcactatgttgcccaggctgttctcgaactcctggcctcaagcaattctcccaccttggcctcccaaagtgctgggattacaggtgtgagccactgtatcttgcctcaataaatattttttaatgaattaatcagcaagtaatctcctctatttactgtgactctgagttatgttcaagagcaagcagttcttgacttccttttctttgtaatgatttagtgcttgaaattacttctacctttcagcattttaaaattggttattattttctcattttcatccccacactcacatcgaacatgatctccactatttaaaagtgtaagatttttgtttcagcctgggatttatcctattgcaaactgctagctactattttcaacctctgtcagctaaatgccagaatgtcactaatcaaaggtggtacttaggggtgaagtgaacagttaagcctccaatttacaagcttgtttttccctgggatacttgtgtgaaagtcgtatgttcctgggtgtgaccctttcgagacaaaatctcaactggtgagttaattatgtataactataattaaatcaaagatgtaggataacggaggcgttgaaatagtttttgctaggcaagggtgtgacctttttaaaaaatgtatgatatatgctgccattcgagaggcaaggaaaacatatctccaaatttccttccaagcggtctaccggcattgacagtaccgcggacaaaggagagtaccaaataaatactccttcgaaccaacggtatactgagagccctgagcttgtgggcggggccccggagcctcccgggacctaaaggcagagggggcgtggctgagggtggtccagacctccaggggcggggctgagacctgcgagaggcaggctgggaagcggcgccatattggcgtcggccgcgctgtattgtcataaatagagccggttttgtggtgttttcactactcggttggatgcctcagccatagtaagtgggaaagtgagcgagcaagcgagctactagcgaccggaggaaagtgaacagggggagaagggaacagcaagaacaggactccagagcgataaacactcgctggagagggagacgcaggaagcgatgaaagagatgtctgcgtaagtggtggggggcggcggttggggtgaggcgggtaggggtgagctgaggtggtccgactgtgtccttgtttccgttccctgtcccttgcgccctgcacgcagctcgccgggatggtctccttcccggctcccggccggtccgcaagggcacctcccctaaacccggcggctcacctggccacccctgcacggactcggggactccgggagtccccagctgtcccgcctccgaggacgccctcagaaaaggatgaggagggaaagaggtgcctgtgtccgtagggagaaattgtcggtcactcgcctgcccccagcactgtctgagcccgtctgctcctgtctgcattggcgcaaataccatccccctgcctccccctcctcccttcccgaccggctgtctccaggtcttcaggagtgaaagacctatcgcagcccaagggtttctctttcatatgaggctacagtcttttcaccgccgtccccaccctctccctcaccccctgcttccccacctacccacaacatctaccggtctgtacctcttgttcacactttgataagtcagaaacagttcccgtacttggcaagattttgttgtagcttcttccattttggtctattaggaaataatttaaacatgcagaaaaatgtagagaataacataagcatcatttgtggagccaccacccatttctcccaaaacgtaactgtacacacatacacgtacatgcacacacgcacacacacggtgtgtatatacgtatctgtgtatttattttaaaaagaaatcaagcattccagatacatctgaaggactctcctacctccttctctggtcccaatcatctcttgctccagatgtctccacagtcttgaatttgatgtttatcgttgctgcctgttttttattttacttcttttttttccgccctcgaatcatgggagctgcatgttttttaatgctattactacatacacatgtgttcataataactggcatagttctagttgtttttaaactttatataactcgtatcacacttggaattctgtaacttctttagcacaacatagtatctctgagctttgttcatgttagtattttagttgtaattaattaatattaattattgtattgtattctattgtaggaaaacaccctaatttaattcttttcctgttagtgactattttatttctaagtttttaatgttacaatgtgacagtgaacgttcttttaggtgtctctttgtacgcttgtaactagaatttctctaggttgtttgcctgtaagtgaaattgatggtttgaagggaatgtgggattctgttgtttactttcccctcccctctagatgggggaagttcagaacctggatttggaattttagggccagtaggctagttggccaactttgtcagcatacaggtaaaaaagtgaggcccgtcatcatggtgtcagagctgaagtagttagagaggagagaatggagtagtggaaagaggttttggagttcagattctggcttgtcctctctttgactttcaggtacttatctgtaaaatggcacttattcaataccccttaggattattgcgattgagtgatactatatagatatgtagataattactctgtcctattcacttaccgtatatatttacatatgtattacacaaacaataccaaaacactgctctagctttctcagaggtaaaaagccaaatctttaaaaagaaattaccacttgaaataactaattgaagttttgtttgttctacaacaaaataaatacagaagataaattaaccagtattttggtttctggggtttttttttttttttttttttgagtcattttggaaggtatacaggctattttatcttccatttgattctttctccctctctgcctaatgagatttttttttttttttttttttgagacggagtttcgctcttgttgcccaggctggagtgtggtggcgcgatcttggttcactgcaaccttcgtctcctgggttcaagcgaatctcctgcctcagcctcccgagtagccgggattacagacgtccgccaccatgcccagctaattttttgtattttcagtagagacggggtttcaccatgttggccaggctgatcttgaacttctgacctcaagtaatccacctgccttggcctcccagagtactgggattacaggcatgaggcaccacgcccggcctctaatgagatctttagctattacagcgtgtcttactctgtgtacttagtagtggtaagacagtgttttgaccagttagaatccaaaaacaattaaacaatctctattgtatgttattttttacagggctaatttattcaacttgaaagattgtttctaattttgagattacattcttactcttggtgttaatggcccttcatggaagcatggtgaagataaatggtagtgttggtcgtttagtgtgtatgtttttactttcatagcaaaattagaagttttgccaacccctgttggtcccagaatttattttgaagttgattagtttgtgtaaactcaaaatctcagaacttgaattggctgagcgcgggggctcacgcctgtgatcccagcaccgtgggaggccgagactgttggatcacctgaggtcaggagttcgagaccagcctggcaacatggcgaaactccgtctctactaaaaatacaaaaagtagctgggtgtggtggcacatgcctgtaatcccagctacttgggaggctgaggtaggagaattgcttgaacccaggaggcagaggttgcagtgagctgagatctccccaatgcactccagcctgggagacagagagagactccatctcaaaaaaaaaaagaaaaaaaagtctcagaacttctgttgtactttattcaagaccgtagtttcttgatggctaagatgtttggagggtggctcatgtatcttccaaaagattgccagtagtataaagaattttatttcaatgtgaagatggtatgggtaccagtctaaaatgaagagaataattaactagaatcacaaagtactaggactgtaaactctgattcaagcagaggatgttaacctcggtttcccaaggacaaatctaattgtgatttctttttaaaagccagattatttcacaaggaccttctaatgggatgttttcatttctttcctggggaaaaaaacccattgtttttactaaaagctttatttcaagtggttgactgcttttcaaagattctagaatctggatggcacttgacttaagtctgcagggtagtggaggtggccctggcacagatcccaatcaaactctgggtttgagctgagtggtgttggtacaattgtcttgatgccaacacatgctgcgcttggcttgaaaaaacatcctaaccatgaaagctgcaggcagtatgaatagccccttcataaacataaacataaaatacccatttttcctttacaagaaagtgtctgccactactgttattactaagtaaacttttaaggtagctaaattaacatgagtagattgagagattcagtgtatcagtatggtatatactttaaattttttgtttcatttttcttattttcttgaacagaaacaccgtgctggacagccagcgtcaacaaaagcattatggaattacctccccaattagtttggcatctcctaaagaaattgatcatatttacacacagaaattaattgacgccatgaaaccatttggagtgtttgaagatgaggaagaattgaaccacaggtatgtcattgaaaaccataaaatatttgacagtgcattatttaatcattaattctgcgaacatattgaatacctactgtgtctctagatacaggtgcagaaatgacaaaaagaaaaatcttggccctcttggagcttacattttaggtaggggttagaagaagagatttgtcatcaataatatcagtatgacactcatgagtaatattacacatgataagtgctactgagaaaaagctgagggggtagaggtttcagggaaagcctcattgagaaagttacatttaagggaaaatttaaagatgaaggagggagccatgtgtctatctgagggaaaagtgttctaggcagaactcttgaagtggtgtatttgaagagtgcatagcaagataccctgggtgtctgagcagtgaggaagcaggaaaatataggcttaatgaaagcaaggtgggaaggagcttggagggcaagagctcttaggaccttgtaaggtgttgtcaaggtttggtttattctgagtgaaatgagaagctattagggttttgaaaagaagattgacatgatgacttaaaaaagttttaacagtcactctggctgctgtattgagagtaatcttaggagaagtgcaagggcagagcagagaaaccagttagcaagccattataatagccctaggaggaaatgatggtggctagaacctggaggatggtcgtagaggtaataaaaagtagaaatctggatatattttaaaggtagggttcttagggtttaatgactggaatgtgtgtgtgaggggtcaaggatgatggccaagatttttggtcttggcaccttgaaggatggaatttcattatttgtggaagactgaggaagaagtaagtttggacagacgttcagttttgcatgttatctttggtatgtctaaaccctacttttctcttctaaatgtggattcatttacaccattggttataagttgttttaataataccaaactactttaatactattagacagaaattagccagtaattagttcccccattttaattagtcaaagacctattactagcaatgagagaattctagcttctattaccacattgtattgaattaattccatagtaaagccaagaaagttgacagttcactaagcctttacagcctcattgaaggcaattttatgatttttattaggctttttgaatttttgaaaatagctcaaaaactaaaatactgtaatcagatttatcacctctttggcactgttaaggatctaaaaatgccaaagagatggccctgtgtcagtagatgtgatagcattatcacatatatgttatggttttaccccagcatcaacacaaagggtactgcctatatgggtttttaaaaatactgtttgttcatttgtttgtttgttttaatctgaagcatttttttttataggctggtggttcttggtaaattgaacaatttagtaaaagaatggatttctgatgtcagcgagagtaaggtaagactctaaactatgtggaattcttgtttttattatatcttggccattcatcctggcaataagatgcaggtgttgagaagtatctgaaatacatcaaagcttggctctctggtatatgtaggaatgaattggtctagacagttgaatttctaagtagatgaggattacccagaagtagccaatatatagctgtgagtccacataattgtcttatttgactcatatgtagtaggccaaaatttaaatatcagattttacttaaaaatcacatttcagctgtttttataaagtattagatctggcaatgctgggcctgcctttgtgcacagcaggaagaggcttgaaggggattgggctcctgtcttccattgcctcatggcccccaccactccctgttttctttgcaaggtgattaattgagcagttactatgtttctcatgtgggattcccttatttgcctacctgcttggttcctaagacataggaatttgcaaactaatttataactacacaacctttttcccctcctgtagcttaactatttttttcctgaaattgattacaatttcctgctttgtgtagtgcagtcctcccttggtatcctccgggggattggttctgggacctccaaagatactaaaatctgtggatgctcaggttccttatatgaaataatatagtacatatttgcatgttaccttttcagatccttttgcatactttcagtcatttctagattacttaaaatatctaatacaatgttaatgctatgtaaatagttgtcactgtaattttttttttattagcatgtttaaatttttttttctttttttgagatggaatctccctctttggccaaggctggaatgcagtggtgcaatcttggctcagtgcaacctcctcctcccagattcaagtgattctcttgcctcagcctcccgagtagctgggactacagacgtgtaccaccacaccgggctaatttttgtatttttagtagagacgtggtttcatcatgttgaccaggctggtctcgaactcctgatctcaggtgatccgcctgcctcagcctcccacagtgctgggattacagcctcgagccaccgcgcccagcctaaattttattcattattttattttttttttttttggagacagagtcttgctctgtcacccaggctgtagtgcagtggcatgatctcacctcagcctccccaagtgctgggattacaggcttgagccaccacgcccgaccataaattttattttattttttttttatagacaggatctccctctgtcacccaggctgcagtacagtggcacagttacatagctcactgcagtctcaaactcctgggctcaagtgatcctcccacctcagcctcctgaatagctggaactgtaggaatgcacaattgtgcttggcttattttgtttattattttttgtagacacaagagtatcactgtattacccaggctggtctcaaactcctggtctccagcagtcttctgacctcagcctcccaaagtgctgggattacaggcatgagccactgcgccttgcctaaaatttgcttgattttttatggctttttccccccagtattttttatctgtgtgtgattggttgaatctgcagatgtggaaactgcagatacggaaggctaactatattttgaatataattgtttttgtttttgtttttgagatagaatcttgctctgtcacccaggctggagtgcagtggcgagatctcagctcacagcagcctctacctcccaggttcaaacgattctcctgtcttagccgcccaagtagctggggctacaggtgcacaccaccatgcccaattaatttttatatttttagtagagacggggtttcaccataatggtcaggctggtctcaaactcctgacctcaggtgatctacccgcctcagcctcccaaatttctgggattacaggtgtgagccatcacacctggccttggttttgttcttgtttgagacatggtctctctctgttgcccaggctgcagtgcagtggcgtaatcttgactcactgcaacctccacccctgtgttcaagcagttctcttgcctcagcctcccgagtagctgggattacaggtgcacgccaccatgcccagctaatttttgaatttttggtagagatggggtttcaccatgttggccaggctggtctcgaactcctgacctcaagtaatccattctcttcggcctcccagagtgctgggattacaggcatgagccaccatgccctgcctcacaattgaatttttattattgtctgagaatcaccactgcgaaggttattttactggctgtaccagaatgagggagagaatgttcaactgggtgataccatttgcctcatcactaggtagcccatactgttatattttaaggtttttgtttttcatagttttcctatctttgccttaacagcagtcagttgaaagcccactgtttaaaagaaagcccactgtttaaaactcacagttgtcagtgtgtctagctgtaaagtccctttctgccccttaatctgcatggatttagaaattaggtaaacaactgcagattttttttttttttttggcgatgggctcttactctgtcacccgggctggaatgcagtggcgcgatctcagctcactgcaacctccgcctcccaggctccagcagtcctcccaacctccccacctcagcctccctagtagctgggaccacaggcatgcaccaccacacctggctaatttttgtatttttgatagagacggggttttgccatgttggccaggctgatctcgaactcctgagttcaagcaatccaactgccttggcctcccaaagtgctaggattataggcatgagccaccacacccggtctagaattctttcttttacagcttttattatttttttctgtagctatgatgaatatgtagaattggttcttttaaacagtgggctcagaataaagttgagtctcctaaagactacagtcgttgagtttaacatggtatttatgctatttacttttgttgccaaaaggctgtctgcctcatttctgaactcaccagggttatcaatagttgaagttattggatgagtcaaattctgagcagatggaaatgctagtgacaggtagtcaaaaaaaataaagttagttaacatcttccattgagcagatgaggtcatttttctttgtgaattgtaattgtctcttttgtgtgggggaatgggggaaggatctctcagtctgtctcccaagctggagtgcagtggcatgcataatcatggctcactacagcctcaaactcctaggctcaagcaatcctctcaccccagccccccaagtagcagaggctacaggtacacatcctgatgcctagctacttttttttttttttttttttttggtagagatggggtcttgccatgttgcccaggctgtcctcaaactcttgtactcaagtgatcctcctgctttggcttcccatagtgttgagattacaggcatgagtcacaaccacacccagcctataattctcttttttttttttttttgattttaaaaaaaaaagtgacgaggtctcactgtgttgccaggctgatcttgaactcttgagctcaagtgaacctcccacctcagcctcccgaagtgttaggattataggcatgagccaccactcacagcctgtaattctctttatgtatattttactttggaaagtaactgaaggatttgggtttaatcaaagatgatttgaatctgtacacaattgggatatttaaactttaaatagtgtagaatcccacatcaaatcattttggttagatactatggctgtggcaaactgatttagcatatcactttctcataaatcatgcgagaatcagacttctcaaaatagaaatgtgaactaaaagatttttttaaggtcctgtcttctctgtccatttcattcatgttaatcatcaataaatttacagattcctgggcatggtggtgcatgcctgtagtcccagctactcaggaggctgaagcaggaagatcttgagcctaagagttcaaggccagcctgggcaacataacaagactctgtctctttaaaaaatctgattaatttactaacttctttctagctataaaattatttgtgatactcttaaccttaatattcattacacagaagcattaacaaggataatatcctattatatagatacttacattcaagttgaagttaatcagcagatattctttagaacttgtactgggcattgtgagaaaatacagagaagcagtagacacagttcttaactctgagaaatgtaaatatgattgaagattaaatatgaaatatgattttacatgccaaagaagtcagtaaatatagcaaaaaagaatttaagaattgtaatggcagaaagcacagaggaaaaaaaagcttgttagggagtaaggataaccagggaaggcttcatggaagaggtggaacttgaagtgaacttctaaaagtggatgataccgatagccagaagctggacatggtggctcatgcctgtgatcccagcactttgggaggctgagacaggaggatcgctttaaaacaggaacttgagaccagcctgggcaacaaagcaagaccccatctttacaaaaattatttaaaaattacccaggcacagtggtacctgtctgtagtctcagatactctgtaagccaaggcagggggaatattttgtgctcagtagtttgaggctgtggtgagctaagatcacactgctgtgctcacttcagcctgggcaacacagtgaaaccccgtctccatctgtttaaaaaaaaaaaaaaaacccaaaaaaacaaaagatgcccagaaagaatgggcaagcacttgaggcaggaacaatggcaaatgcagtgaaaaggaggttggattctgtaaccatgttggttggttggtaggtagttggagcttcagaaaggaagataagaagacaaggcaagaaagatccctaggaacatgtcgtggagattttcaacaacaggcccaaggatccttacctcagtagttagggaagaagacattggcaacttttgagtacaacaactatatttaatagagtaatttaagaacatcagccagtgaattttatacaagatagtgaaagagaaaaggaagattaattaggggtagtttaggatgccattaaatagcctagaattaggggagtagtcgttgaatagaaaggaggccacaaatttgagggatataagctaagaattggtaagccaagaagaaggaaaaggtttgggcagtaaggataatgaggaacaaaaatagagaactcagaagcaatatctgactgttatcattggaagaatttttttgcttgcttgaggctggatattgaagtggatcaggatacttgagtgactatctgatgggcttttggaactggctctcaagaggtgaaaattagcttttttttctttttctttctttttttttttttttgaggcaaggtctcactgttgttgaggctgaacctcctgggctcaagcagttgtcccattgcagcctcctcagtagctgagactagaggcacacgccacatgcctagctaatgttttcttttttgtagagatggtgtctcattgtgttgctcaggctggtcttgaactggacacaagtggacctcttgcctcagtctcccaaagtgctgggattacaggcatgaccacgcccagccaaaaagtagcattttaattacattataatccaagaaatgttaattaagcttgttagaatagctctcataaggagatcatgtcaggaatgactccgttcttacagaaaggttgtagagctagaatcaagaaattaaacatacctgtcacaaaaactaaaggggatatgggattggccaagagtgttatgttttagagaggtgaaagcacattagtctggtaactgagagttccttgttgactaccgaaagagtgatgaagcgaaagacaggcagttggaggggacaagtatggtcaagtgattaaaaagaaaagcttttcttcagatagggatgtatgtatgtgtagtgggggtgaatttgttttgtctttcctctgggaatacccttattacttcagatcacaaccagaggatctgtgaagcacttttacaaatctaatcttgacaaggttggcaaatctaatcatgtatcatttgctcaataaaggccagtagacattatggtgatttttttttttattttttgagacagagtttcactcttgttccccagactggagtgcaatggcacaatctcggccgctgcaacctccacctcccaggttcaagtgattctcctgcctcagcctaccaagcagctgggattacaggtggccaccaccacgcccagctaacttttgtattcctagtagagaagaagttttgccatgttggccaggctggtcttgaactcctgacctcaggtgatccaccggccttggcctcctatagtgctgggattacaagtgtgagccaccatgcccagccaacattgaggtgacttttatgctaaataatttgaataattgaatgtcttccgcttaattttattttagaacctcccaccttctgttgtggctactgttggtggtaaaattttcacatttggatcctataggcttggagtacacaccaaaggtaactgcttttctgtgttctagtgctaagaacattcaataacaaactcttcataattagaaaatgtaggagaacaaagttcccactatttcactacttagagctaatcattgttaacattttcttgtactcaacttccatactttcttctgtacatatgtttgtgtgtactttaacaaagaatataacacataatatattcttaattaagaactactttaatttacaggagctgacattgatgcactttgtgtagctccaagacatgtggaaagatctgatttttttcagtctttttttgaaaaattgaaacatcaagatggcattagaaacttaagagtaagtatcctctggcatttaatattttgaatttagattagtaacaaatatctataaaaactagggcttaaaactattgaaataccttctaagttactattaggaggtatttaataagagtagctttaataagtgatgattaaatcatgattaagaacatgggccttagagttatacagacttgggttggcatctagaatctactacataatagctcctagatcttggtcaagtaacctaatcctctgagcctgtttcctgatctgtaaaacagagatgtggtaataacttttttataaggtttttgagtattgatgagatatttacataaaccatttactgtagtagccaacaatgattgatacatatcaaatgatgagtgctattatgtgtaaggttcagttagtaactctttatatgtgtatatctagccattcattcagcaaataaaatttcagcactagtaatttgttagatgctggcattagtcttacagatacaatagtaaacaagacattgtttattgaggagggggttatgtgaactaaataaacaaaacagtgttaatgcattctgaagtgctagaataaggtgaaggtcaaagaatctgtgatatttggggaatctgggaatgtttttagacaaggaagttaagaatttgttaggttggggagttaaggaagactcagaaaacctaatggtttctactaatctcaactgtattaattaaatttttgatagattaatcatgagctttcattattttaaaatttctaactctagtagcctttctaaataatcagttttcagtttagactcgaaattataagtacccagatgatagcaggtttttgtttttttgtttgtttttttaattttactttaagttctggaataccatgtgcagaacgtgcaggtttgttacataggtatacatgtgccatggtggtttgctgcacctatcaacccattatctaggttttaagatctgcatgcattaggtatttgtcgtaatgttctccctcccttgtcccccaccccccgacaggccccaatgtgtgatgtttctctccctgtgtccatgtgttctcattgttcaactcttacttatgagtgagaacatgctgtgtttggttttctgttcctatgtttgctgagaatgatggcttccagtttcatccatgtccctgcaaagaacatgaactcactgttttttatggctgcagacgatagcagttttgctttccagttctgaggaatatttttagagggataataaattagatactgtaacaggcattttgtgtatcttacataatacaggtcacaaagtagaaatacttacctggaatgtaagaccaaaaacattttcactttgtctattgagttaaaatacaaatcgggagtaaagatattcacattattggtagttagaaaggataaagaagggattacttctatgtggttaaaatacaaatcgggagtaaagatattcacattattggtagttaggaaggataaagaagggattacacctatgtgttataattgttttccttttttgtaggctgtagaagatgcctttgtacctgttataaaatttgaatttgatggtattgaagtaagtgtttaatatttttctgactttacaattgaactgtttaaacttgtaagtttgttttctgaaatcaggcttaacataaatgcatattttaaaaaatcaagtaatctcttttttttttttaaatgaagagatggggtctaactctatggccaaggctggagtatagtgacacaatcatagctcactgcacctttgagcacctgggttgaagtgatccttccacctgagcctcctgagtggctaggattccaggcacacaccaccacacctggctaattttttgtatttttagtagagacggggtttcaccgtgttagccaggatggtctcaatctcctgacctcgtgatccgcccaccttggcctcccaaagtgctgggattacaggcatgagccaccgcgcctggcccatatttttaatttctaagaatactattttattctttaaatgttcctttttatttttgtctgcatttatttacagcctcctgaccttatttcctagatatgacatttttatctgctttcttaggtctactgggtctgttaccacttgtccatctgctttccagctttcatagcttttgtttgtcactttctgttctttgtcctagtgaattttgcctttaacatcaaaataatactaaacacaaaaataaaattgaattttcgtggtattttagtgaggtttcaagagggagtgaatgtaaatgtgtgttggatcttctatctttatctagaaatttgctcataaggctttgatttttttttctgcttggcatatatgttaacatttaaatgctttcattaattgaaagtttaattaccttaacacaactttatagtgattttcccatgtgagactgcctacataggcctatcgaagctttggtagaacttcccaaactcataaccagagcttttcacattttttggtgggatgggagaggatggattaaaaggagaaaatgtaatttttttctcttttttcacatctttccaaagattgatctagtctttgcaagactggcaatacaaaccatatcagataatttagatctaagagacgactctcgcctgagaagccttgatataaggtgtattcgcagcttaaatggtaagcttctaaaaagaaatctcagatacctgcttcagaacaattagagaaatatagatatttttgctgaattgactattcagttttggagattggactcagtttaaaatgtaattttccttatacagataatgtgaccacatttaagaatcctaaaaaccacaaatttatttgaaaggctgtgtatatttatattactggttctcaaacttactggtctcaagacttctttacactcttaagatttatggaggaccccaaaaagcttttgtttatgtgggttatatctgtcaatatttaccatgttaaaaaataaaaactgagaaatttaaaaagtacttattcatttataaataatgaacccattttaaattaatataaacttttgtgtgtgaagaatggcttcttttttttttttaacattttgcaagtctctttaatattaggcctgatagaagacagctagattctcatttgtgtctacaattgattgtaatattttgttttggttaacatataagaataaaatctggccgggcgtggtggcccacgcctgtaatcccagccctttgggaggccaaggtgaatggattacttgagcccaggagtttccagaccagctaggataacatggtgaaaccccatctctaccaaaaataaaaaacatttagttggatgtagtggcactcgcctgtagttccagctactcaggaggctgaggtgagaggatcacctgagcccccgaggtggaggctgcagtgagccgtgattacgccactgcactctagcttaggtgacagagtgagaccctgtctcaaaaaaaaaaaaaaaaaagaggccaggcacagtggcttatgcctctaatcccagcactttggcaggccaaggcaggcagatcacctgaggtcaggagtttgagaccagcctggacaacatggtaaaaccccatctctattaaaaataaaaaactagccaagtgtggtggtgcttacctgtaatcccagctactcgggaggctgaggcaggaaaatcacttgaacccagaaggcggaggttgtggtgagctgagatcatgccaccacaatccagccagggtgacagagcgagtctccgtctcaaaaaagaaagaaaaaatctgtcctcttagttggaaaagggaggagtgttttaatagccttttcagataattatggatattcttcttaaacttggccagtaacattttttttctttttaacagttttattgagatataattacataccattatacacctcactggtctttttcttttcttttcttttcttttttttgagacggagtctcacactgttacccaggctggagtgcgatggcgcgatctcagctctctgcaacctccgcctctgggttcaagcgattctcctgcctcagcctcctgagtagctgaaattacaggcatgtgccaccacgcctggctgatctttttgtatttttaatagggacggggtttctccatgttggtcaggctggcctcaaactctcgatatcaggtgatgccaacctcagcctcccaaagtgctgggattacaggcatgagccaccgtgcccggacttcactggtctttagtacactacaatccaatgttagaatattttatcaccctcaaaagatcctttatacccatttgcagtcatttccccttccaatccgcagtcccaggcaaccactaatctgctttatttctttgtagatttgcctcttaaagacgtttcatataaaaataatcctatgtggtcttttgcgtaagggttctttaatttggcatgtttgtgaggtttatctgtatttgttccgttttgttgctgaataaaaatgatagtttcttaaaggttagagtatggaatctaaaatcatatcaaacttgttgtattctgttacatgacagtccactgatctgtcttgttctttgagtggtccctttattcatgcatgattttgtactatcatgccttggtcatttggaaaatattggttcacaaaattatttggatgttccaaatgttaatacacatttcactataaaatgtgaaaaaaaaaaaaaccagcagtcattagtgaccagtctcaacagaaaagtatggaaaggtgtcaagctcatagtaacagataaaagttgtctgaaattcagatttaacttgaaagcttaaattttattattggcaacaaattttgtcatttgttttagttgaactgagaggttccttttgtccatttttaaggaaatacctaactgaataactatagtttatctgccagttattttttcaggtgaaactggtgttccttgaaaaaagcaggtagttgagcttacaacttacacagtttcacatgttctttccccacctttatttttaactgcaagtgtgtggtggtgaagatatttttttctgctagtgcagtttgttgccccatgtgttttttgttttttgttttttttttgagacgggagtctcgctctgtcgcccaggctggagtgcagtggcgcgatctcggctcactgcaaactccgcctcccgggttcacgctgttgccccatcttgattgactgccaaggtacctgcagttttatccactgtttcttttgcaccatcagtgcaaatgttaacacggtgaaaaaagccttagtattattataaaaaaagtttgacctcacagattcccaggggtacccagaccatactttgagaactaatgtctttttttttttttttgagacagagtctcactctattgcccaggctggagtgcagtggcgtgatctcagctcactacaacctccgcctcccgggttcaagcgattctcctgcctcagccctttgagtagctgggaatatagatgcccaccaccacacctggctaatttttgtatgtttagtagagacagggtttcaccattttggccagactggtctcgagcgcctgacctcaggtgatccacccacctcagcctaccaaagggctgggattgagaaccaatgttttatagtgtcttgtttgaccgaatcattattgcactttggtgtatttccagattgtaacagtaaattacagtatttgtggaaaaggtttacattgaagtaattacagtgttgtaattgggaggtatttgattaatagtcaaggaagaaaactaaaaaatactcaggcacatctcattttggattgcattacccatgtcttttttaattaccctaaagcaaactgatttctcataagtggtaaatttcatacacataaaataagccccaatgttttattatctttcatatttttagcattcgagagtctggaagttaggagggcatttgaattaactgagaatttgctgcatagtgaaaaatgaatgctttgtctttttcaggttgtagagttactgatgaaattttgcatttagtgccaaataaagaaacttttagactcaccctaagagctgtcaaattatgggcaaaacgtaagtatccctagtcttttatgtttgcattataaaattctaattttctcttgccagtgaaagaagcatatatagaaactctgaacctaatgatattgttggaggttaagggccaataaactctgtaatagctatttgcttttcaagtacagtggttatggtgttttgataagtagtatacctcttcctcccttgggtaaaaacttaaagccctgacttttcatcttaggttcagtcaggcagtcagaataattcagaacttgaagactgataccctccctgtgggtaacaccatcttacgtatctttgtattcacaccagcaaagagtctggtttatactgtagtaggtgttcattaagtgaagagtctacagtgatgactttcacttgtttttaccttataacacttttctaataaagcctggaactgttactagtttatatatatagtttatatatttaggttcataaaaatccctttgcttaccactgagctggcacagcacattctgtattattatttaagcacacctctgagatattgtaggtttggttccagacaactgcagtaaagcaaattacaattttttttttgtttcccagtgcatataaaagttacatttacactatactgtagtctttttttttttctttttttgagacggagtcttgctctgtcgccaaggctggagtgcagtgggcaatcttggctcacaccaacctctgcctcccgggttcaagtgattctcctgcctcagcctaccaagtagctgggattataggcacgcaccaccatacccgggtaattttttgtatttttggtagagacggggtttcaccatgtttgtcaggctggtctccaactcctgaccttgtgatccgctcgcctcggcctcccaaagtgctgggattacaggcgtgagccatcaagcccggctccaaaatgtgtttcttaaatggtaaaacaagaagataactccttgatccatgggctatagaatagatgctgtattagcagacatgaaagtaactttaatctcctagtatgtgtccactggagctcgtgggtgactaggtgcattgtcaaaagagcagtcctacttagaaaggaatcttttttttttctgagcagtagatctcaccaatgggctttaaaatactcagtaaaccatgctgtcaacagctgtgctgtcatctaggctttgttgttctgtttgtacagcacagacagtagagtgagcatcattcttaagggcgctgggattttgggaatgttaaatgagcattggcttcatttttttttttttttttttttttttttgagatggagtctcactgtctcgcccaggctggagtgcagtggcgcgatctcagctcacggcaaccaccgcctcctgggttcaagtgattctcctgcctcagcctcccaagtagctggaattacaggcatgtgccaccacacctggctaatttttgtatttttagtagagatagggttttaccatgttggccaggctgatcttgaagtcctgacctcaggtgatctgcctgccttggcctcccaaagtgctgggattacaagcatgagccaccatgcccggccagcttcaatttaaagtcaccagctgcattagcctctaacaagagaatcacctaccctttgaagctttgaaaccaagcttctcctctctagctgtgaaagtcctagatggcatcttcttccagtataaggctgtttcatctacattgataatttgttgtttagtgtagccaccttcatcaatgattttaactagatcttctggataacttcctgcaacttctgcatcagcacttgttgcacttctagttgtggagatggcttctttctttaaaccttatgaaccaatcttcactagcttcagacttttcttctgcaccttcctcacctctctcagccttcatatgattgaagagaagttagggctttgctctggattagactttggcctaaggaaacattgtgtcttgtttgatcttccatccagaccgttaaaattttctatcagcagccaggcgcagtggctcacagctgtaatcccagtactttgggaggccgaggcgagcggatcatgaggtcaggagagttcgagatcagcctgaccaacatagtgaaaccccctctctactaaaaatacaaaaattagccgagtgtggtggcacgtgcctgtaatcccagctactcgggaagctgaggcaggagaatcacttgaacccaggaggcagaggttgtggtgagctgagatggcaccactgcactccagcctgggcgacagagcaagactccgtctcaaaaaaaaattttttttttctgtcagcaataaagcagttttactttttttgtcattcctatattcactggagagtagcacttgtaatttctgtcaataacttttccttggcattcacagcttggttaactgattggcacaaggggcatagctttcggactatcataactttcaacatgcctttttcactgagcttaatcttttctagtttttgatttaaagtgagagacatacgactctttcttttacttgaacacttagaggccattaagggttcttaactggcctaatttaagtattgttgtgtctccaggagtagggagacctgaggagagggagagagatgggtaatgaccagttggtggagcattcagaacatatacatttaccaagttcaccgtcttatatgggctcagtttgtggtgccccaaaacaattacaatagtaacatcaaagatcactaatcacaaatcaccataacagatataataataatgaaaaagtttgaaatattgtgagaattactaaaatgtgacacagagacatgaagtgagagcttatgctcttggaaaaatggtgctgaaagattttctcaactcaaggttgccgcaaaccttcagtttgtaaaaaactcagtatctgtgaagtgtaataaagcaaaacacaacaaaacgaggtatgcctttatattttatttcattttatttttttagacaggggcttgctgtatctcccagaccggaatgcagtggtgcaattatagctcactgcagcctcaaccttctgggcccaagcgatccttccactctagcctcccgagtagctagaactacaggcatatgccactacacccggctaattttattttattttattttattttatttatttatttttttttagcagagacgaggtgttgctatgttagctaggctggtctcaaactcctgagctcaaccagtcctcctgccttggcctccaaaagtggtgggattacaggtgtgagccacagtgcctggctgagtgtgacagttaaaggtttcttttcggggtgctgaaaacattctagtattgatcatgttgatgattgcacaactctcagtatactaaaaaaccattgaattgtgtactttaaatggacgaatcttatggtatgtgaattacatctcaataaagctgttacaagttaaaaaatagcaacacatggcttgtggctaccatattggacagtgcaggtctaaaaagatagtaagcaagtagaatttgtccttgggctcaagtgtcttgtatacttaagataaagtaaaatttgcactgaagggataacatgaacaatttgcccttctttaaagattaaatgccatgttttgtcagttagatgcatatttttcatatttaccacatctgaaattggtattttgtaggtttttttcttttgctcgcttggcgggacataatatagatagctatataaaaaacggtcatgacaaccatggtggtgcacccctgtaatcatagctacgcaagaggctgaggtggaggatcagttgagcccaggagtttgaggctacagtgaattatgattgtgccagttcactccagtctgggtgacagagtgagagcccatctcttaaaaaaagaaaaaaaaaaatagaaatgaatgatatcagtggtgtattctactttatggagaggtatccaaattctgtgaaatactgaagtaagtctccagctttatacttgatttaaaaatacccatgaatatgattattaattaaatattcattcttccccattgtctctccaaatgtctccttcctttcatttttctctcaatcctaaatactgaaaaatggggaatttcaatgtagtatcagtggagcccagttgggcagttggaactgaggcaaagaactgaggtgtctgtattagaagggaaagtaaggagggtaagattagcaatttatggtttactaattagactgtgggcctaatgtgaaggtctgcttatcagttttaatgttttgtttataggggaaaatttccaaccaaccgtcttatgaataaagttaccttgttgaatgtcacggatattcattcaccttgtaaagagcagaaaaaaaaagaatgtcacagatagtaggtcctaataataattaacaaatatattgattttctaggacgtggtatttattccaacatgctaggattccttggtggtgtctcctgggcaatgctagttgcaagaacttgccaattgtatccaaatgcagcagcatctactttagttcataagttctttttagttttttccaagtggtaagtatttacgtgtgtactttgactgtttactaatctctacctatgcgtaagtttgtttggaaatttaagagctatacatagactttttctgttgttttacattgctttgtaaagttgaaagtataaaacatcaactttgaggcaatggtgggacatctaattggcaccttcttccagggatttgtaaatgtgggcctttagcttgggagagcagttaaaataagtttggctttgcaaattactagttatgtagaggtcgtttaagctttcctcatttgtaaaatggagatgataatcacattgatatattagtattttcagtaaatgttggctgttgctgttactaaattatcggaattaaatccatgaaagcaaatgagaaggaagtgaaagattcaggtgtaaattagttacagttaatgaaaagtaatatttgccctttcagagaacactgcattaaaatgagcagcctttcctttgtatactttcttacctagcctttttttttttttttttaattgagacagggtctcactctgttgcccaggctagagtgcatgcatctcagctcactgcagcctctgcctcctgggctcaagtgatcctctcacctcagcctcctgagtacctgggactataagcgtgcaccactaggcatggctaatttttgtgtttttagtagagacaggatttctccatgttgcccaggatggtctcgaactcctgagctcaggtgatctgcctgcctcagcttcccagagtactgggattacaggcatgagccaccatgctcggcctttttttcctttaataccaaatacccagaacattcactctgtagaaggttagaacaatctaataattataaggtttcatgtagtacctgaagtgagatcatgtgtaagttaatttgccttattcatgtcagggaatggccaaatcctgtgctgctgaagcaaccagaagaaagcaatttgaatttgcctgtctgggatcctcgggtatgtgatttattatggagtttctttaaagcttttaaggaagaggacatttcactaaattacagtctagttaaagatagttcctcttgtctctgttcttccttctatataactatagtcctcttcctccttctgctgtggtttttgttttgttttttgtgcagatgattaggatcactaatgctgatccaaatgttatgtcattaaaaatcgcccatgtaagatgagtgggtgtcttatggacagtgtcataatccagtgtggaaaaaatgtctcaaaagtaattggatacttggctgggcatgatggttcacgcctgtaatcccagctctttgggaggccgaggcgggtggatcacctgcggtcaggagttcaagaccagcctggccaacgtggtgaaaccccctctctactgaaaatataaaaaattagccgggcgtggtggtgcacacctgtagttccagctactctggaggctgaggcacgagaatcacctgaaccccagaggcacaggttgcagtgagccgagactgtgccactgcactccagcctgggtgacgagttgagacttcgtctcaaaaaaaaaaagtaattggttactaataataaagtactaaagtataataaaagatttactttgcaatacaatttaaagcaaattcattgttccagggtagcataattctcccatatcttgcattttaatttgcttttagagtgagtgctcattcctctaggtaaccaaggggaagtcatccattgagtgggtggtgaaaaaggattgagaaccattaaaccagataatgctttttgtagttataatactgtatttccttgattataagagatcattgtttataagatgcacatcaatttaacagcttttctgaggaaaaatatacttctgcagtatttcctttgactttgactatcagacatatccaacttcagaaataaatgcagttggggagggaaaatgtacttcttaaacttgaggaaatgtagtattaaatttatatttcatattcttcagacttttggggaaatgaagtgagaacaactgaaataggagaatagatcagttattctgcttctaatttcacaggtaaatccatcagataggtatcatctcatgcccataatcacccctgcctacccacaacagaattctacgtataatgtgtccacatcaactcgaacagtaatggtagaagaatttaaacaaggtaaacatgtggccctgttgccctttacatattcccacaagtttttggttaacagttttattctctgttgcagctatggattggcagttagagttatacctattctttctaaaaattctttcaagtatggttattttgttttttagtaatgagttttcaaaagtatatgataatattaaggccaaaaatggagccagcccagtctggttgaaactaattttttgtgttctaagaaacaacattatatatatttatattttgttactcaagagtttggtgggccgggcgcgatggctcatgcctataatcctagcactttgggaggccgaggcgagcagatgacctgaggtcaggagttcaagaccagcctagccaacctggtgaaaccctgtctcacaaaaattagccggaagtggtggtgggcacctgtaatcccagctactcaggagcctggggcaggagaatcgcttgaacccaggaggtagaggttgcagtgagccgagatagatccaccacactccagcctgggtgacagagtgagactctgtctcaaaaaaagaaaaaaaaaatttcgtctggtggagtttgagattttgtagtagtagagtgatttaagagctggtcccttttcaaaatcattcttcttctttttttttttttttttttttttttaatttaggtcttgcagtcacagatgaaattcttcaaggaaagtcagattggtccaaactacttgagccaccgaatttctttcaaaagtataggtacgtgaaattttgtattttgtatgtatgtgatttttttttttttaaagaagaatgttaaacatagttaatatatggcaggtgacagctcttttatttcttaagcaagagagaatagattaacaaaaatcctaagagataagagtgtttctttattctggtagtatctaatccagtattagtgactttttaaagtgaattgttttttacttgtaggacctagaattaattttgtgaaaatcagagcacatttaattttcataaactgtgtgcctttattagctcatttgttcagtgagagggagggaaaaaaggggatgattaaaaagcaggctgtaacaatttttctggctttttttcctgattgttgctgaaaattcttcagacattatatagtattgactgccagcgcatcaacagaagaaaaccatctagagtggtaagacttctatttcaagttttctacctactgtgtggtgatagtaacttatttatatggtgctttaccatttataaagtactttcttgcttgattttcaaaattattatatctctttttttttttttttttttttgagacaaagtctctgttgtctaggctggagtgcagtgtcgcgatctcagtttcgccacgttggtcaggctgatctcgagctcctgacctcaggtgatccgcccacctcagcctcccaaagtgctgggattacaggcctgagccactttacccggcctttttttttttttttttttttttttttttgagaaggagtctccctctgtcacccagactggagtgtagtggcataatctcagctcactgcaacctccgcctcctgggttcaagtgattcccctgccttagccgcctgagtagctgggactacaggtgtgcacttctatgccctgtggctaatttttgtatttttagtagagatggggttttaccatgttggccaggctggtctcgaactcctgacctcaagtgatccgtaaaattattatatcttactggtgattgttgtgcatgaccatggagcttcagtgtttaaaatatgccatcaaattaatgtttcagaatcaggagggacatgagcaaaagacacatgtatagatgttgcttcttattgcttctcagccagatttaagcaaaattttgagctagtttggatgattctgatagctaccatctgagtttctcttttctttgtttttattttttattttgagacggagtctcgctgtgttgctgaggctggagtgcagtggcgtgatctcagctcactgcaacctccgcctcccgggttcaagcaattctctgcctcagcctccagagtatctgggattacaagcacccaccaccacgcccagctaatttttgtacttttagtagagacggggtttcaccatcttggccaggctggtcttgaactcctcacctcgtgatccacccgccttggcctcccaaagtgctggaattacaggcgtgagccaccacacccggcctgagtttttcatttttgccattgtgtttacctccaacaaaactcagtagaaaagacattttgtatatccttttaatttaggagataatggcttaaatctttcagattaagcttccgtcaacaggtaagagatatttgtggtcaagaagtagtgtgttctttctagtgcatctaaatttatcccttctgcctctactatattcacatccttggctctatcagacggaagctgttagaccaccagagatggttgtactttccttgggtctgacttctggaaaagcaaaacagcaatactgttttatttttgcttcaagagtttaatccttatttcattggtaattaaaggaactctgaaaataatcctgtcactgaaacagtattttgtttgtctagatctgcagtcagaaaatagggtctaggccaaattcagtctgccacctatttttataaagttttattggaacatagccatgtttcttcgtttatatattatctatggctgcttctgtgcttcatagcaaagttgaataggtgtaacaaagactgtatggcccagaaaccctaaaatttactatttagccctttacagaaaaagtttgccaacccgtcatttagatgacactggaataacacagatttttgtagatttactgttaaagcacacataattataatgtataagcttttgctgatgtttttaaaaaatgttaaaatgttcttgtaatgtttctaattcataaagtcattaataagcaagctgccatcggtcacatttcttaagtgagatagaaataaaattgcagaaatccgatgagacttgctgtattttaataggatgtgatccaaatttagtgaattctttttttgttttttgttttttttttgatatggagtcttgctttgtcacccagactggagtgtagtggtgcgatctcagctcactgaaagctccacctcccaggttcatgccattctcctgcctcagcctggcaagcagctgggactacaggcgcccgcacctcgcctggctaattttttgtatttttagtagagacggggtttcaccatgttagccaggatggtctcaatctcctgtcctcgtgatgcacccaccttggcctcccagagtgctgggattacaggcgttagccaccgtgcccagcccgtgaatttttttaaatgcaaagtcaagcatgattgtttcatatattatgtgccaatattagtttcattgtttaaacttatcttagccttaggatttatttttttttttagagacggagtctcactgtcacccaggctggagtatagtggggtgatcatactgcaacctcaaactcctgggatcaagcgatgcctcctgcctcggctccccaagtagctggggcctgcaggcccttgctaccatacctggctgattttttttttttttttttatcttatagggatggaatctcactatgttgccccaggtgatctcgaactcctggcttcacgtgatcctcccgcctcagcttcccaaagtgctgggattaacaagcatgagccaccgcacctggcctagcctagccttaggtttgagacataagatttgaaggtagaaaaagattcaggactagataaaccagcagtttttgttcatgccctaagccatgactgttttatagtcttaactaagggtattttagattcaggaatgcattacatagattagttcttctattaaaaaaaagaacacacagaaatctactaacttgtcatttactacaatggcgttttaaatggggttcctaatatattgggctgaaatttttaaatgaacatgtaaagattcataggtaatatgctgtttggtttacttgagtgtagctttcatatttaaagttgatataaaatcaattgtgtttacaattgcatttaaaatggggttcctaatatattgggctgaaatttttattttatttatttatttatttagagatggaacctcactctgtcacccaggctggagtgcagtggggtgatcttagctcactgcaacctccacctcccagcttcaagcaattctcgtgcttcagcctcctgagtagctgggaatataggtgtgcgccatactcggccaattttttttgtatttttagtaaagacagggtttcaccatgttggccaggctggtctcgaactcctgacctcaggtgatctgtgcacctcagtcttccaaagtgctgggattacaggcatgagccactgcacctggcctgaaatttttttttttgagacggagtcttgctctgttgcccaggctggagtgcagtggcacaatctcagctcactgcaacctccacctcccagtttcacgtgattctcctgcttcagcctcccaagtagctgggattacaggcactcaccaccacacccagctaattttttgtatttttagtagagacgggattttgccgtgttggccaaactggtcttgaactcctgacctcaggcgattcacccactcttgcctcccaaagtgctgggagtacagatgtgagccaccatgcccagcccgaagttttttaatgaacatgtaaagcttcgtagttaatatgctgtttggtttacttgagtgtagctttcaaatttaaagtggacataagataaattgtgtttgttgtttattttagggttggattagtagaatctaaaatccgtgtacttgttggaaacttggaacggaatgaatttattactcttgcccatgtgaatccccagtcattcccagggaataaggaacatcataaagagtaagttaattgttttataatactttatttcttaaataatgttatttggtatatgcatcatttcagagtaattgtgagatttttgtttaacaggcattgatgggagtatgacacattatatatttgagtttgagtgtctaggcattaaaaataagtacataactactttggtagcccacaaaccccagcaaaacaccatcacaatatttggagcatctttaagaatatatttagtaagtcattttcatagctgcttaatccttctcagaacaacaggggataacttaccagttctggatgtcacttttaagaatctggccagaccactgaaatctgtatttgtgagatagagacatagagaccaagttttaattatgaaatagcatctgtaaagttgtaaaaaataataataattaatggaaattcttaaattttactttatagcaacaattacgtatcaatgtggttccttgggataatttttcggagagtagaaaatgcagaaagtgtcaacatagacttgacatatgatatacagtcatttactgatacaggtaagactccatcatcatagagctgtgattctcaaacctggctattactcagtgtcatctgcctacaatctggctggctgtacttattaaagttccacaattggttaagtgaacatggcatatccgtattgctgttaaaacaggaaaggagccgggtgcggtggctaatgcctgtaatcccagcactttgggaggcagaggcgggcagattacctgaggtcaggaattcgagaccagcctggctaatacggtgaaaccccgtctctactaaaaatacaaagttagtagagtgtggtggcggatgccagctgcttgggaggctgaggcaggaaaattgcttgaacctgggaggaggaggttgcagtgagccgagatcgccccactgcactctggcctggcccacagagtgagactgtctcaaaaaaagaaaaaaagaaaaaaaaaagcattatgaagcaatttccaagatatattaagtggggggtaaaattcagaacactgtgtacactgtgctatttatataaaaataaaagaaaataaatacacatttgcttacaaatgcatagaatatctctggaaggatacttagtttaaaaaaaatggcaagactggttgcttctaggtcagggtacaggataaggagacatcactgaatactcttcaacgctttaagttttgtagcatgtgaatgttatctgttttattttattttgttttaagagacagagtctcactctgtcacccaggccggactgcagtggtgcgatctcagctcactgcaacctccacctctggggttcaagtgattctcatgccccagcctcccgagtagctggaattacaggtgcgtgccaccagtcctggctaatttttttatttttagtagagacggagtttcaccatgctggccaggctggtcttgaacacctgacctcaagtgatcctgcctcggcctcccaaaagttctgggattacaggtgtgagccacctcgcctggctgaatgttatctgttttaaaacaaagaaaggaaagctctttgtatgtacaaccggggtttgtgatcacagtcttaaagatgacttgatttttgccaggcacggtggctcacaagtgcttgtaatcctaatactttgggagactgggatgggtgaatctcttgagctcaggagtttgagaccagcctgggcaacatggtgaaaccccatctctacaaaaaatacaaaaaaaagtttgccaggtatcgtgccttgtgctcccagctatctgggaggctgaggtgggagaattgcttgaacccagaaggtcaaggctgcagtgagccgagattgcgccattgctctccagcctgggtgacaaagtgagatactatgcagccataaaaaatgatgagttcatgtccttcgtagggacatggatgaaattggaaatcatcattctcagtaaactatggcaagaacaaaaaaccaaacaccacatattctcactcataggtgggaactgaacaatgagaatacatggacacaggaaggggaacatcacactctggggactgttgtggggtggggggagcggggagggatagctttaggaagtacaccttatgctaaatgacgagttaatgggtgcagcacaccagcatggcacatgtatacatatgtaactaacctgcacattgtgcacatgtaccctaaaacttaaaagtataataataataaaataaaatagaaaataaataaataaataaaaaataaaaaataaaagacttgatttttatgggttttttgtttgttttaaatagagacaggatttcgccatgttgcccaggctgatctcgaactcctgggctcaagcaatttgcccaccttggcctctttaaagtgctgggattacaggtgtcaaccaccgcacctggccagacttttatgtttttgatatgaaataaatatcagtaagtacagaattgctgaatatatttcaggatcagtgaaaagtatgtctttcacatctagccctctagtcacaactctggaatatcttaatgtatctgttataaatttggggttatttatcttaagaatctggaatagttatacattcatactattaaaggtattggcttggctcatctgggttttctgaattcttttgaaagagccctcatatttatcatgaaaatgcagattcctggctgggcgtggtggctcacgcctgtaatcccagcactttgggaggccaaggcgggcaaattacctgaggtctggagttcaagaccaacctggccaacatggtgaaaccccacccatctctactaaatatacaaaaattagccaggtgtggtggcgggtgcctgtaatcccagctattccagaggctaaggcaggagaatcgcttgaacctgggaggcggaggttgcagtgagctgagatctcgctgttgcactccagcctgggcaacaagagcgaaactccatctcaaaaaaagaaaagaaaatgcagattcttatgtttcaccttagaaccattaaatcacactctggggagggagccagagaatctgcaacttaaacaagcactcctggtaactctttcataatcaatctggaataaaaacattcgccataaatttttccattctaattagggcttaaattttttagaaaggataagactgggacatagtttattataaatttataagatattatttttcagattaagaaacttgaggccccaagagattaaataatttactacatctcacagtacttgctgtgtaaaacaagcctcccatccctgtcttcagtgggcttataatctcattgagtatatttacaattaaaacattaagaaatttgtgtggtagttaataaaacctgttttttcattgggtatatttacaattaaaacattaagacatttgtgtgtgagttaataaaacccattttcttataaggcgtgaaaagcactagaatgggaatctagggctgtgtggattctgatcctggcaaggtattcagagctgtttagcctccttttctcaactgtacaataaggatgtatttgtaagatggttcctgaagtctgtcattctatgattggtgtggtagctgcagtagtaaattctcatggaggaggaggatagcttgaattgcaccttggatatttggcctaagaattagcttagaaggccaggtgcagtggttcacacctgtaatcccagcactttgggaggccaaggtgggtggatcacttgaggtcaggagttcaagaccagcctggccaacataatgaaaccctgtctctacaaaaaatccaaaaagtagctgggcatggtgccatgcgcttctagtcccagctactggggaggctgaggcaggagaatagcttgaaccccggaggcagaggttgcaatgagttaagattgtgccactgcactcaagcctggatgacagagcgagagtctgtgtcaaaaaaaaaaaagaattagcttagacctgggcaagtagttatgaggagagattgcctttggggaaaatatcagaaaataagatctggaaaataccgttttttaaatatatttattctatcaacaaggtttgattatgagaaagtcttagaaagtggacatggaaaaactattggattcatggctgggcacggtggcttacgcctataatcccaccactttgggaggccgaggtgggcggatcacctgaagtcaggagttctagaccagcctgaccaacatggagaaacccagtctctacgaaaaatcaaaaaagttagctggacgtggtggcgcatgcctgtaatcccagctactcgggaggctgaggcaggagaatggcttgaacccaggaggtggaggttgtggtgagctgagattgcgccattgcactccagcctgggcagcaagagtgaaactccatctcaaaaaaagaaaaactagtggattcatgaataggattgtgatgtgatggaagtgtattaaaaatatttgttttgtgagagggttgtgggtgggtgggtggccggtggtgatagtggggagatagtaaaagtatatgcatttcagaaaaattaggcagaacccttggttcagaaagaagtttcccatttaacatattaacattgttacagtgtacagacaggcaaacaatataaatatgctaaaggagggaatgaaaattgaagcaactcatgtaaagaaaaaacaacttcaccactaccttcctgcagaaattcttcaaaagaagaaaaaggtgagtttataatcttaacccttcagtatggttttactcagacaaatgatctgggaccaaatttgcattctacagctcccaaacctattgagaaaaataaggaagatataggcagttcaatctaggactaaaatctcattttcattaatcacaagagataatttgcttaagtgaccttcagaattgaaaccagtctttatattgtcatttgcattttgaaatcctaaaatcgttcccttctttcagcaaagtctctctgatgtcaatcgaagctcgggcggacttcaatccaaaagattgtctctggatagcagttgtctggatagctccagagacactgataatggaacaccttttaattctccagcgtccaagtctgatagcccttctgtaggagaaacagaaaggtctgtctttatttcaaatgtgtccttttggttttctgttcagtttatttgaggataatgtgaacttttctatacctctgctactgccttttaaaattgttaaaagatttcattttactggctgctggtcaatttcttgcttagaaataactcgtggtaatcctgtgggaaacggtataggcttatgagcatatgggactagataggtacacagaaatgtacacatttgttgcttaaatttttctcttcttactgggtcctctgcatttttcccccttttagttcaatgaaatgttaaagtacaggcctgagccaacagttgtggccaggcacggtggctcaggcctgtaatcctagcactttgagaggtcacggcaggcgaactgctggagcccaggagttccaagaccagcctgggtaacatggcaaaaccctgtctatacaaaaaaatacaaaaattaattggccgggcacagttgctcacgcctgtaatcccaacactttgggaggccaaggcgggcagatcacctgaggtcaggagttcgagaccagcctggccaacatggcaaaaccacatctctactaaaaatgcaaaaattaacagggtgtggtggcatgtgcctgtattcccagctacttgggaggctgaggcaggagaatcgcttgaacccaggaggtggaggttgcagtgagctgagatcgtgccattgcactccagcctaggcaacaagagcgagactctgtctcaaaaaaacaaaaacaaaaattagctcggcatggtagtgcacacctgtagtcccagctacctgggaggccaaggtgggagaatagcttgagcccggaaggttgaggctgcagtgatccatgtgttcatgccactgcactctagcctaggtgacagaacaataccatgtctaaaaaaaaaaaaaaaaaaaaaaaaagcagtggtaaatgttacaacaagagtgttttaaataactaatggggccaggcgtggtgggtcacatctataatttcagcactttgggaggctgaggcaggaggattgcttgagcctcaggagttcaagaccagcctgggcaacatagtgagatcctgtctccacaaaaataaaaatttaaaaaattagcccgatatgatggcacacacctatgttcttagctacctgggaggctgaggtggcaaagttacttgagtccaggaggttgaggctgcagtgagctgtgattgtgccactgcactccaacttgggcagtagaatgaggccttttctcaaaaaaggagaaaaaaagtaatatttaaatcatttattgatgataatttaacactttcattaggaatagtgctgagcctgctgctgtaattgtggagaagccactgagtgtaccaccagcccaaggactttccattccagtgattggcgcaagtaggtatctaaacttgtatatattaataattatatttacaaaaaattagctaggcatggtggcacacgcctgtagtcctagctactggggaggctaaggtgggagggtcacctgagcctgggaagtcaaggctgcagtgagctgtgatcaagccactgcactgcagcctgggtgatgggaatgagagaccctgtctcaaggaaaaaaaaattacataaatgtttaattattaaaatcctttttttccttttcagaagttgactctacagtaaaaactgtatcaccccccactgtgtgtaccattcctaccgtagtaggacgaaatgtcattcctagaatcacaacacctcacaaccctgcccagggacaaccgcatctgaatggaatgtcaaatataactaagactgttacacctaagagatcccattccccatccatagatgggactcctaagaggttgaaagacgtagaaaaggtaaagttacaactttagtggtgattcagtagttgatattttttatagttaatactaaagaaacaattttccatagctgttggtgttctgttaggagttggctgaaaagaatatttacccaaatcttaaagaaacaatattaattgctcatcctaaattgaaattactaatacgtctgaaaatttgaatgattggtctgagtttctccttgatttacagaagtcattactgataacaaaatctcatttcttgtgtgttgatatgccctgcttccagtaggtggtggtaaaactatatttgttagaatctgaattgatttaaccaaaaagatcacccaaactgtagaaattaacggtggcagttgaattcaatctaatttaaattatcttctcttaccaatccatgtttatagtaatttttataatagtgtaaccaataactagttttccagtttatatagatttatatgggtttttgtaggtacataatagcaatctatttcaatgtttatattttagtttattcgacttgaatcaacatttaaggacccccgcactgctgaagaaagaaaaagaaaatcagtggtaaatatattaatagtgtgcttcagaatatttattgtaaagcgccatgtatcaggaaaagtgccatattagaaagtaggtcagattagatttattttcaggttttcgttaggttttattttaagtagaaataagtgtttgcatataggaaagttagttttcacttgtgttgattcttctgtttttaggatgccattggaggagaatctatgcctattccaactattgatacatcacgcaaaaaggtaacaagatagtcttgttcataggtacagtacataggtaaaaactcataggtaatctacaagtacaaaaggcttattaagagcctagcactgggaaaaagtaagattttgtccctgtccccaaggactagcagtgtagttggggttggagatagcaagtatatagttctgaatgtatgtacctcaaaagtctaaaaaagaggcagtagtttaagacaactttattatctatttagattatgttcaccctttgttttttatctttaaagaagcagttggatgctcagcacattaatttcttaccaagcacctggaggtatatctctgttgtgtactattgcttactgccaaaacataggtttgataattaggaaccatatgtattaatattttagaggaaccaaatgtagtggtatatatagtaagtacctttaaaacatgagctaaacgcccctaaattgtaatttaaatgtttattatttgaagaattacttttataactaaaaatgtgtgtagtattaagtgtggtatgctaaaaagcaagtactcaaaaaccagccttgtgtaaatagagaaaaaccttctctgagagtttataatgaacagaatggcttatttataataatgataaataattataaatatatatgatgataattataaattataatttataataaaacagaatggccattaaatagtaaagtgcttttcatcaactgttaccctgccaggttctccaggatgtagtagctattctaaagcaaaatagtatactcacaggctattagttgtagattttgagcctttaacataagattaagttacaaaaaatatgaacgtataattatgtgtcatggtggaagaaaaaattttgagatggatattgaagtacaaaagagtgaaatgacatatctggattttttaatatatccagtctaaagggaaagtgggtacaccaaacaattgcagcaaaattgtaataatgtctgaaacttggttttggcatttaagtccttattgccctggtgtctacttctttgtatatctgaaattgctcataattgttttaatgcatatggatatgatacagatactggcttagccaaggtaaaacaagaggagaattaagcagtcatctcttgacaagaaactatccccattacagaagtctagattttgccttcctttttttttttttttttttttttttgacatggaggctcgctctgtagcccaggttggagtgcaatggcgcgatctttttgtatttgtagtggctaatttttgtatttgtagtggaaaagggtttcaccatattggccaggctgctcttgaactcctgacctcaagtgattcgcccgccttggcctcccaaagttctgggattacaggcgtgaaccaccatgcccggccctagattttgccttctttatgtaataatctttaatgccctcagaatccctcaaaccgatgtccctgaatttcataaccatcaaagttatctagcctaagtacaaagttcagttttcctgagaacttaagtatctcacagattgagtcagtggtcttcttcatgaatgtattacagaaacaaattgagggacataactctcagatattaaatttttctctactgcacacactcatttttcacttcacaccccaagagcttcctgtttagtcaccatgaacttccttttttttttctttgcttgaccttaaggactgtgttctttatgcatttcttgatccaggcatggcagttcctcttttcctgtacatattcacactcctgccacttctaccctttctcttatccctctgcttttcacctctgactgtaaaaagaagtagcagttccgaaagcaagagttccctatgaacacggaaggaaatattcattgcatacttgagtgtttaggagctagagggtttgggagaaaaactccccaagttttgtgactgactttctagctgggcctttataatatatatgatgtgcttttccttttttgtttcctctttctttctaatagagactacccagtaaagaactaccagattcatcatctccagttccagcaaacaacatccgtgtcatcaaaaattccattcgactgacccttaatcggtaaaagcagtgcctcctcacttaagtgaacaagcaatcatttagtggcatagatgcagccacttgttttttaaatagaagtggctgtcatacgtgaaataaggtgaaagtgacagccttcagtctaataaccttgaagtggtttttgaactgtcaaactttgacctgtagatgctgtagcattctctcactgattgctacatacacttctctgaggatcacctgctgtcaaattgccatctacagtattacagctttgcatttgggggttttactgccttaactttcaatgcttgttatgggaaccagttcttagccacttggacactgataacaagtcctgaactccttttttgttttgttttttgtgtttttctttttttgtcttatgttgtaatcattgtatagagctaaaaaaattgaaaacaaacaaaaaaattgtcttgtattttccaaatgttaatacatttactttagcattgaagccactttgaaacctgagataaatgaatgtgaggtatcttttctgctttcctcatttgtgtagatgtactgtctgttctgttgatttaaattatttttttccagattggcacatgaaatatttaaacttttttgtgtgcctttctgtccaaatgttgcatagttaccagggaagattagtccagtgattacataagagttgggcaccataaattctctatattttgcctcccatggaggcctttgaaatgcatctttattaaaaatcaaaatataaccaggatactgaaagtcagtatatgaatggtaaaattgttacatatcctatttcatgccattcttgttagttgactggtattttttactgaggagcaactcattccagcatcaacaataagataacctttaagtatggcacacttgtatttttgaggtgtaaaattaacttggcatgataattcctgatcattatttaccccacaacttcaaatagtttcttcacggactaggcatgcagaaataagcagtggattttattgaaacctaaaggcattttgaatgacattgttaccaaccattaattggctcaggacctttgtaatttttatttaactatatgagttgtctttttttacgctgcttttttcaatgcatttcttaatattttttaagtttcatgaatgcatgctcagtttattaaaatccataaccatgtaattcttgtaatatgttgattcagtgttttgtaaatgaagtcgtatgtattttcagagtatttttgtatgtactgtaagataccatcttttcaaagagaaacgtttaaaacctttattgtctctccttagtctaattttttaaatatggattatgcttgaattactatatttaaaatgaaaatgtatagattacacagccaggaatgctagtatctaccaccttctttagatttcactcagcatttagtaggtccagtaggaaaaacccaaaatggtacattgagtagtgtggggaagacacctcgtgtattataggactcacgggatgccatctagcaagtggagaaatagcagtccattttctcttgcaagccctttaccattgagttgaaattcttgaattgccagagagccgtatcctccaggtcccactcctgttcattgccccttaggtctccaaaatgtaaattctaatgtttaccttgtaccatggaaaacatgaaaagagtcttagaagtaaagaacaacaaggaaaaaaatgtttgttctattattccctttttatatagcagcaaaagataagaataaaatcacataaccaagttgaagcttccttggcaaagctgttgtcttagctgactctttccctttattcagatgttttgggattgttctacaaatagtctatttgagcaaaaatgaatgattatgaaagaaccgaagaattatcacctgacttcaacttttgaaagctttagtaaggaatttgattaaattttatatactggatgtgtatgcatttctgcatttcatatcttttgcttttaaatcagccttcaaagtatctttaggaattccttctgtatccatgtttaccccattatgtaaatagatctttggagtgactagtggagtttttctttaataaggaagcaacaagtctaaccttgtactataggataggcatttattttagattaaggagcccattcaacatgtcaatgagtcaacattagagtcctcaaagatagcattcttcaacctgtttggtaactgaggagttgataaaatacttttgagatggtggggtttgtcagaaataaaatattttctatcctgaccagtaggtagaactttgagtacatttcgttaacttggtgggaagcttccattgtactagttccaagtaaaaaaggagaaagtatgatctgggattttgtgttatgatgagaggcactaagtacatgtgtttgttttgttttgttttgttttgttttgttttgttttgagacagagttttgctcttgttgcccaggctggagtgcagtagcccaatctcggctcactgcaaccttcacctcccgagttcaagctattctcttgcctcagcctcccaagtagctgggattacaggcacccaccacctcgcccagctaatttttgtatttttagtacagacagcgtttcaccatgttggccaggctggtctcgaacttgtgacctcaggtgatccacctgcctcggcgtcccaaagtgctgggattacaggcgtgaaccaccgcacccggccgtgtttgttttcaagtgtgaaaaaatacctagaagtatattttatgaagtcaaataatctgttcttcagtatatagacacatgttcattttcacaagggcattacattttaatttgctcatttttcagtagctctggagaatatgtatgaaaggaaaacaattacctgctagcttaaaccttagggacttaaccaattcaagatagaggtacatggcttaaaactttgtaaaactgggacaggagaattattatttttttattttttatttttttatgaagacaagagtttcactctgtcacccagtctggagcacagtggcatgatctcacctcactgcaacctctgcctcccgggttcaagtgattctcttgcctcagcctcccaagtagctggaattacaggcctgtgccatgcccagctaattttcgtattttcagtagaaatgggatttcaccatgttggccagggtggtcttgaactcctcacctcaagtgatctggctgcttcggccaccctaagtgctgggattacaggcataagctactgtgcccagccaggagaatgaattttaaaaatctatgttagtgtttaaaatgagtgctttgttttaaagcagcaatttagtagcattattaaaatgcttacttcactatagtagcaattaggtaaagatgggcaatatcaaaatgggctaaacttattttccactatgttccacacctttgaaataggaattcctaacttgagaatcatgaacccttagggaatcctttataattgtgtataagaagttctagtttacatgcatttttcttggggaaagtgcatagtttagatcagcttctcgaagtggcaaaagtatgggagttagggttaggaaccaccaggattgaataatcctggaatattatataattttctacttttgattttgctgtggtatatttctgaaaatgtgctgtggctcctaactagtaaaatgggctggtgagggactctggaattctgaatttctaagtttataacctaaaatgaaactgtaaagtcctcggtatttagaaaaatgcttaatctcagatttacagatggcctcatgataacttagattcgttaacagggtcaaactttagttcaacaaatttcaacccaatattatcacagtacaatagcttagaatgatcattagaaatggtagaaaatagaataaatcattaaagatcccaaaatgttgagttctgtagcatgaaaactctcttgctcctccatgtttgtagttcaggccagaacaaactaaacagaccaataaatataaaagtgatagtttagggaaaaaaaaaaactttgtataaataaaattgtatgtgtgttcaaataactacctattaaatcatccaaagcttagaatttaaattggtcatagtagcaaatagtgcagatgatggaagaaaaccagtctcaataatggttttttttttccaattgcataaggtcacgtcatcccccaaattgtctattttttcttttctttttttttaagatggagtctcgctccgtcacccaggctggaatgcagtggcgcaatcttggctcattgcaacctccacctcccaggtgcaagcgattctcctacctcagcctcccaagtagctgggactacaggcgcccgccaccatgtgggcctggctaatttttgtagagatggggtttcaacatgttggccaggctggtctcaaactcctgacctccagtgatgcacccgcctcggcctcccaaagttctgggattacaggcgtgagccaccgtgcccagcccctattttttctgaaataatttttcggatatacttttatatttgaaattagttgaacataagatgatcatcaagcttgctataagttttaagctattgctacatttgaacaaagacccacgtacttatcttagaaagtacttaggatatctttgagattaatggtgctacatcactctacagtactatgtaaaatgaatggagctgctgttcctttctagctagctgtttgtgtagttcatattaatttaccctgccttttatttggattgtctgatttcttagttgtacacatgaacctcattatttgcctggaataagtaatcaaataaaattgctttgataaataggtgatgattgagtgatgttatttgggactaactcaaaagtaccagaagtcttaacttttcagtgacaaccaattttgtcatttaccactcagactctttttggtagataatggtatctactacccacttagtatgaatgcaaagctcagacctaatgtgcatcacacagaatcatttattaaacgtttatcagcaagcggtggcacaacagtttatacagtctgctctataaccttaatggagtgtcccagctttctgtcccttttggtggtctgaccaccctttcatgaaaaggccacttgaggtgtctatgtcaagcactaggggcaaaattctgtcacccttctgatcaggatcaggcaatcagtcctccgtactaataatggctggacacaggatcaagctgtgggtactatgcatacaagtacaggttacagggctcgttacattcttaaacctcttgtaagaatggacagtgactggtttttagccaatccatgtgctagtgctgaattcacaaataagagcttgtgtctgcgtcgttagtattactagcaagctgttcatgtcaccaatggaaacacatttgacatttattaagctaattggcaaagtctgcattgattgagctatggataacaagggcttctagtagtcacttttgaagtgtgggcttctcgattggattgctaggtggccatctctggagtgtaaatttctggttggggcaactcactgctcctaggacataacatactaacacaattaccatgctgtgataaaatgttttctaaagtcaattaacatcataacaggttcttcgtggatccaaatgtgttacagtactaaggacaaaaataaaacgtattggggtcgggtgcagtggctcacacctgtaatcctagcacgctgggaggctgaggcaggtggatcatttgaggtcaggagttcaagaccagcctggccaagatggtgaagtcccgtctctactaaaaatacaaaaattagccaggtggtagtggcatgcacctgtaatcccagctactcaggaggctgaggcagaattgcttgagcctgtgaggcagagttgctgtgagccgagatcatgccactgcactcccgcctgggcaacagagtgagatcctgtctcaaaaaataaagaaaaatatattgggccaggcatggtggctcactcctgtaatcccagcactttgggaggctgaggcgggtggatggcctgaggtcaggagttcaagatcagcctggccaacatggtgaaactccgtctctactaaaaatacaaaaattagccaggtggtagtggcatgcacctgtaatccctgctacttgagaggctgagacaggagaatcacttgaacccgggaggcagaggctgcagtgagccaagatcgcacaactgcactccagcctgggggagacagagtgagactccatctcaaaaaataaaaataaaataatgtattgctttttaatcccctatcctaaaaaccatctttcaaaccatatgatccaaccaaactgttttaatggatagtgtttaaaaatatatacttcagggccttccttgccaatctttgattattgacatttttggcttactgctgcatagagacttccatgataccctagccagactcttaccttttcagtatgttacttgtacgtttgaacgtttaaattattctgacttgtgtaatgctcagtttacctgtttcccctgacaagattgtaggtttgagaatagtgacctccggccaagcacagtggctcatgcccgtaatcccagcactttgggagaccaaggaaggaggatcgcttgaagccaggagctgaagaccagcctggccaacatagtgtctctacaaataaaattagcccagtgtggtggtgctcacctgtagtcccagctactcaagaggctgaggtggacagactgctggagcccagcaggtcaaggccgcagtgagctatgatcacgccactccactccaccctgggtgatagagtgagattccatgtcttaaaaaaaaaaaaaaaaaaaaaaagaaagtgagctttatccaaaaatctttatgtagtgaatacccagaaaatatttaagaggaaaacacatgagtccttgtttggtttgaggggtaggattgttttgtttttaaatttaaataggattatcttaaagagaagcccaatgaaggaactaagatgcaagaaggcaaacaaaacttcctgaggccattaagacacgttgtctgtgccgggcacagtggctcacacctgtaatcccagcactgtgggaggccgaggcaggcaggtgcccaggctgttcctaccaaggggcacctgcaggcccacgtggagccaccgtcagtacccccttggcccccatcctgtgctcctcggtgcccaaagtccggaggggcttaggcagcagggggctggtgtgtcggcgccactccgggcgcacacacacctggccgggtcgtgacagcacccaagctcggctccaactttgctctaccctggagtgggagccgggagcagggaaaggccaagcagcgggagcaggcacttccgagcctgtcggggaagaggggcttcccaggtccctaaaagctagggatgcctgggtccgcagtcgtgactgggtggctgcagctgcacccaggaacatcaggctcctgcccttccaattcagaagtgggcaggggtcccgcctgttccaggctcctgctggctccatggcacacgcagccctggccgcaccttccctgctgcagccgctccaggtgggccactgctgccatcagtggcttggctgtgaatggtcacatagtctttacaagtagagaatagagaatattgaactagccaaaaattgtaactatattcggaagaatcggggagggaggtaggacagggtgtgagagtgaaatcctcatcttcagtggcagtgagtagtaaatatctaagacaaaaatctaggataatatatgcaagttatttagaaatttgtaagtaatcagtaggagaaaagtcttaaaattatgaaaatgtttgcctctagggagcagatatcaagaatgagaaataggaaagtagatttttttttttttttttttttttttgagacagagtctcggtctgttgcccaggctggagtgcactggcacaatctcagctcactataacctctgtttcccaggttcaagtgattctcctgtctcagcctcctgagtagctggaattacaggcatgtgccaccatgcccaactaatttttgtatttttaatagagacagagtttcgccatgttggccaggctggtctcgaactcctgacctcaggagatctgcccgcctcggcctcccaaagtgccaggattacagacgtgagctgccgcgcccagctgaactttttgacttttaaactaatatatccactgtctaaccagtagggggtaggagaatgttgcagactttgaagcccacagacctacgtagatacctcagctacatctcttaccacctgtgagaccttggacaaattgcttaacctttgggttcaaggttactaatctgtaaagtggaatctcaacacttatttcatatgacaaaaaatgaagggtttaagaggctctgtagttcaatggcctagcctcagttgccagctctagcacttacttattgactataagaaatggtggaagttaatgcctcagtccctcagttttctcttctgaaaaagtggtgacgatcataacagactctacacccaaaaagctgctaaatggattaaaagaggcaatccaaaagttcctagtataaagtggagttcaagagtttttttgtggcatgatgagttacatgaaatagcatatgtcatacactatgcatcgtgcttgacccacagtgagcgtcccttctcctaaaaatacatcacaagaatcggggaagaaggccagtgtctgtctctccagccagactgaggaatagatctccacctcctgtgcaatagtgtgaaaatacatggcctttgccctgttaccaagcccttctccaagtatacctctcaaaacagttttattcagagaaatgtgtagaactcattgaattcttacaaagtttccctgaaggcctggctcagtggttcatgcctgtaatctcaacactttgggaggttaaggcgagaggatcacttgaagccaggagttcaagaccagcctgggcaacacagtgagactcctgtctctacaaaagaaaacatcagccaagcatggtggtatgtgcctgtagtcccagctacttgggaggttgaggaaggaggtttgcttgagcccaagagttgaaggttacagtgagctatgattgtgccaccacattccagcctaggcaactaagtgagatcctgtctctggcaaaaaaagaaaagaaaaaagtttttcactgagtactttagttcacttaaagattataatagggccaggcatggtggctcatacctgtaatcctagcacttcgggaggccaaggcagatggatcacttgatcccaggagttcaaggccaacccgcgcaacataggaagaccctgtctcaacaaataattaaaaaattagccgggcatggtgtcacatgcctgtggtcccagctgctcgggaggctgagggaggagaatcatctgagcctgggaggttgaggctgcagtgagcggtgatcacaccactgcattccatcccgggtgacagtgagaccttgtctcaaaaaaacaaacaacaaaagattataacattaaactgagatgaaaaagcttatcaggctcatctctgccagcccaggactcccagaatgcctggcaaagtgcagcaccaatgtgtaatagatgttctatagcagaaacagccatcctaatttcagctctgactagatctagaaaatgggccacacatggagagatggccacaggaatgatctaaagccacgcccacacacagatgcaactgtatctcattactcccacctctcctgggagtgagacaaaactgtctaacccagatcccaagtcacttcctgccagggcttctcagcagttcaaagaacttctatgtgcaggttctttccaaatagattggtttcttgaaactcacaagaagtcaaacaccagaaaagaggggatttctgaaagccacccactaggatggcaactggtacttggtagtttcaaatattaagaaaagaaaaaaaattggcgttgattaggcagtatctaatctccctaagcacaggaagtgaaggcgattgagtctgatttgcaggaggccccgaggttgcacaaagcagtcactcccctagcatggcccactcactgcctgctgagaagcctgctttgcctgcctccagctgagcacaccagagggaaagcaccattaaattccctgtgcactcttcaaccaattagctgcaccaaggtcaccaggtgaagggcgtggggaagcagagaagaaaagatgctatgggcttgacaaggttaaattgatggggcccgtgggacatggctattcattccataaatgtttatcgagcccctagcatccacctggcattgagctagctaggcacccagagcataaacaagatttaaacctgtccctacactgaaggacctctcagactggtagaaagttagctgacaaatatctaggttatgctgtgctgttgggagcactgcagagggaccccttaattctgccttggtcagggatggtgttggggaacaacaaccccagagctgaatgttgtaggccaattaagagttttccaggtgaaagctgggggaggtggaaggctggaaaggttctggaaattggatgttgtagtagggctgtgtgaaaggagcattagttgcatttggggaaaaggtatgaggctggaatgtagacagagtcctgcttcccatggacaagagagggagaggaaaagacagaggcatggagatggtaaggataaggaggctcctgcagtatggggagaagaaactaaagtaacataaaggaatacgttccaaactttggaggtagaaaggatggggtcgctgacaaactgtattcagggaagagtggaggagggtgcccaccttccttggactggaaggctgactgtattgtcattaatcaactctgagataccaggggagggctgcgggagagggtacctgaatttagatttgggggtgttgaactggagctagcctcatggccatccacgtggagatgtacggtagaccatgggaagtattggtctggagccctaggagagaggccttggctggatgtccaggcttcacagcgtgacagactcatctttatggatatttgttaagcgggaatctcggttcctacctccccagacctgctgcaggaactccgggccgctctgggctttgccctgacaagcaggaggggtggcttacccgattggtcagcttggggagggaactaagcatgtgcggccacaccctgtggctcctcccttttacgtttttcccgccctgcgcagtggctctgctgtgtctgcgggtggccttgactgtgaagagcccgtgcttggagcacactcaaagccgctgtcttcaatgagctgtattagtaataaggcaaatgttttggactccgtctgtgtcctaaactcacaagggagaaaagagagtgtcgtgtattgaatcccactggcaggctcccaacagtattaatttgtgtgggttggtttgttttttggaacagaggctcattctcttgcccagactggagtgcagtggtgtgatcccggctcactgcagtgttgacctcctgggctcaagcgatc

SEQ ID NO: 1399 - DNA, 4252 bp, Homo sapiens
gagaggcaggctgggaagcggcgccatattggcgtcggccgcgctgtattgtcataaatagagccggttttgtggtgttttcactactcggttggatgcctcagccatagtaagtgggaaagtgagcgagcaagcgagctactagcgaccggaggaaagtgaacagggggagaagggaacagcaagaacaggactccagagcgataaacactcgctggagagggagacgcaggaagcgatgaaagagatgtctgcaaacaccgtgctggacagccagcgtcaacaaaagcattatggaattacctccccaattagtttggcatctcctaaagaaattgatcatatttacacacagaaattaattgacgccatgaaaccatttggagtgtttgaagatgaggaagaattgaaccacaggctggtggttcttggtaaattgaacaatttagtaaaagaatggatttctgatgtcagcgagagtaagaacctcccaccttctgttgtggctactgttggtggtaaaattttcacatttggatcctataggcttggagtacacaccaaaggagctgacattgatgcactttgtgtagctccaagacatgtggaaagatctgatttttttcagtctttttttgaaaaattgaaacatcaagatggcattagaaacttaagagctgtagaagatgcctttgtacctgttataaaatttgaatttgatggtattgaaattgatctagtctttgcaagactggcaatacaaaccatatcagataatttagatctaagagacgactctcgcctgagaagccttgatataaggtgtattcgcagcttaaatggttgtagagttactgatgaaattttgcatttagtgccaaataaagaaacttttagactcaccctaagagctgtcaaattatgggcaaaacgacgtggtatttattccaacatgctaggattccttggtggtgtctcctgggcaatgctagttgcaagaacttgccaattgtatccaaatgcagcagcatctactttagttcataagttctttttagttttttccaagtgggaatggccaaatcctgtgctgctgaagcaaccagaagaaagcaatttgaatttgcctgtctgggatcctcgggtaaatccatcagataggtatcatctcatgcccataatcacccctgcctacccacaacagaattctacgtataatgtgtccacatcaactcgaacagtaatggtagaagaatttaaacaaggtcttgcagtcacagatgaaattcttcaaggaaagtcagattggtccaaactacttgagccaccgaatttctttcaaaagtatagacattatatagtattgactgccagcgcatcaacagaagaaaaccatctagagtgggttggattagtagaatctaaaatccgtgtacttgttggaaacttggaacggaatgaatttattactcttgcccatgtgaatccccagtcattcccagggaataaggaacatcataaagacaacaattacgtatcaatgtggttccttgggataatttttcggagagtagaaaatgcagaaagtgtcaacatagacttgacatatgatatacagtcatttactgatacagtgtacagacaggcaaacaatataaatatgctaaaggagggaatgaaaattgaagcaactcatgtaaagaaaaaacaacttcaccactaccttcctgcagaaattcttcaaaagaagaaaaagcaaagtctctctgatgtcaatcgaagctcgggcggacttcaatccaaaagattgtctctggatagcagttgtctggatagctccagagacactgataatggaacaccttttaattctccagcgtccaagtctgatagcccttctgtaggagaaacagaaaggaatagtgctgagcctgctgctgtaattgtggagaagccactgagtgtaccaccagcccaaggactttccattccagtgattggcgcaaaagttgactctacagtaaaaactgtatcaccccccactgtgtgtaccattcctaccgtagtaggacgaaatgtcattcctagaatcacaacacctcacaaccctgcccagggacaaccgcatctgaatggaatgtcaaatataactaagactgttacacctaagagatcccattccccatccatagatgggactcctaagaggttgaaagacgtagaaaagtttattcgacttgaatcaacatttaaggacccccgcactgctgaagaaagaaaaagaaaatcagtggatgccattggaggagaatctatgcctattccaactattgatacatcacgcaaaaagagactacccagtaaagaactaccagattcatcatctccagttccagcaaacaacatccgtgtcatcaaaaattccattcgactgacccttaatcggtaaaagcagtgcctcctcacttaagtgaacaagcaatcatttagtggcatagatgcagccacttgttttttaaatagaagtggctgtcatacgtgaaataaggtgaaagtgacagccttcagtctaataaccttgaagtggtttttgaactgtcaaactttgacctgtagatgctgtagcattctctcactgattgctacatacacttctctgaggatcacctgctgtcaaattgccatctacagtattacagctttgcatttgggggttttactgccttaactttcaatgcttgttatgggaaccagttcttagccacttggacactgataacaagtcctgaactccttttttgttttgttttttgtgtttttctttttttgtcttatgttgtaatcattgtatagagctaaaaaaattgaaaacaaacaaaaaaattgtcttgtattttccaaatgttaatacatttactttagcattgaagccactttgaaacctgagataaatgaatgtgaggtatcttttctgctttcctcatttgtgtagatgtactgtctgttctgttgatttaaattatttttttccagattggcacatgaaatatttaaacttttttgtgtgcctttctgtccaaatgttgcatagttaccagggaagattagtccagtgattacataagagttgggcaccataaattctctatattttgcctcccatggaggcctttgaaatgcatctttattaaaaatcaaaatataaccaggatactgaaagtcagtatatgaatggtaaaattgttacatatcctatttcatgccattcttgttagttgactggtattttttactgaggagcaactcattccagcatcaacaataagataacctttaagtatggcacacttgtatttttgaggtgtaaaattaacttggcatgataattcctgatcattatttaccccacaacttcaaatagtttcttcacggactaggcatgcagaaataagcagtggattttattgaaacctaaaggcattttgaatgacattgttaccaaccattaattggctcaggacctttgtaatttttatttaactatatgagttgtctttttttacgctgcttttttcaatgcatttcttaatattttttaagtttcatgaatgcatgctcagtttattaaaatccataaccatgtaattcttgtaatatgttgattcagtgttttgtaaatgaagtcgtatgtattttcagagtatttttgtatgtactgtaagataccatcttttcaaagagaaacgtttaaaacctttattgtctctccttagtctaattttttaaatatggattatgcttgaattactatatttaaaatgaaaatgtatagattacacagccaggaatgctagtatctaccaccttctttagatttcactcagcatttagtaggtccagtaggaaaaacccaaaatggtacattgagtagtgtggggaagacacctcgtgtattataggactcacgggatgccatctagcaagtggagaaatagcagtccattttctcttgcaagccctttaccattgagttgaaattcttgaattgccagagagccgtatcctccaggtcccactcctgttcattgccccttaggtctccaaaatgtaaattctaatgtttaccttgtaccatggaaaacatgaaaagagtcttagaagtaaagaacaacaaggaaaaaaatgtttgttctattattccctttttatatagcagcaaaagataagaataaaatcacataaccaagttgaa

SEQ ID NO: 1400 - protein, 734 aa, Homo sapiens
MKEMSANTVLDSQRQQKHYGITSPISLDKEIDHIYTQKLIDAMKPFGVFEDEEELNHRLVVLGKLNNLVKEWISDVSESKNLPPSVVATVGGKIFTFGSYRLGVHTKGADIDALCVAPRHVERSDFFQSFFEKLKHQDGIRNLRAVEDAFVPVIKFEFDGIEIDLVFARLAIQTISDNLDLRDDSRLRSLDIRCIRSLNGCRVTDEILHLVPNKETFRLTLRAVKLWAKRRGIYSNMLGFLGGVSWAMLVARTCQLYPNAAASTLVHKFFLVFSKWEWPNPVLLKQPEESNLNLPVWDPRVNPSDRYHLMPIITPAYPQQNSTYNVSTSTRTVMVEEFKQGLAVTDEILQGKSDWSKLLEPPNFFQKYRHYIVLTASASTEENHLEWVGLVESKIRVLVGNLERNEFITLAHVNPQSFPGNKEHHKDNNYVSMWFLGIIFRRVENAESVNIDLTYDIQSFTDTVYRQANNINMLKEGMKIEATHVKKKQLHHYLPAEILQKKKKQSLSDVNRSSGGLQSKRLSLDSSCLDSSRDTDNGTPFNSPASKSDSPSVGETERNSAEPAAVIVEKPLSVPPAQGLSIPVIGAKVDSTVKTVSPPTVCTIPTVVGRNVIPRITTPHNPAQGQPHLNGMSNITKTVTPKRSHSPSIDGTPKRLKDVEKFIRLESTFKDPRTAEERKRKSVDAIGGESMPIPTIDTSRKKRLPSKELPDSSSPVPANNIRVIKNSIRLTLNR

SEQ ID NO: 1401 - DNA, 3706 bp, Homo sapiens
gagaggcaggctgggaagcggcgccatattggcgtcggccgcgctgtattgtcataaatagagccggttttgtggtgttttcactactcggttggatgcctcagccatagtaagtgggaaagtgagcgagcaagcgagctactagcgaccggaggaaagtgaacagggggagaagggaacagcaagaacaggactccagagcgataaacactcgctggagagggagacgcaggaagcgatgaaagagatgtctgcaaacaccgtgctggacagccagcgtcaacaaaagcattatggaattacctccccaattagtttggcatctcctaaagaaattgatcatatttacacacagaaattaattgacgccatgaaaccatttggagtgtttgaagatgaggaagaattgaaccacaggctggtggttcttggtaaattgaacaatttagtaaaagaatggatttctgatgtcagcgagagtaagaacctcccaccttctgttgtggctactgttggtggtaaaattttcacatttggatcctataggcttggagtacacaccaaaggagctgacattgatgcactttgtgtagctccaagacatgtggaaagatctgatttttttcagtctttttttgaaaaattgaaacatcaagatggcattagaaacttaagagctgtagaagatgcctttgtacctgttataaaatttgaatttgatggtattgaaattgatctagtctttgcaagactggcaatacaaaccatatcagataatttagatctaagagacgactctcgcctgagaagccttgatataaggtgtattcgcagcttaaatggttgtagagttactgatgaaattttgcatttagtgccaaataaagaaacttttagactcaccctaagagctgtcaaattatgggcaaaacgacgtggtatttattccaacatgctaggattccttggtggtgtctcctgggcaatgctagttgcaagaacttgccaattgtatccaaatgcagcagcatctactttagttcataagttctttttagttttttccaagtgggaatggccaaatcctgtgctgctgaagcaaccagaagaaagcaatttgaatttgcctgtctgggatcctcgggtaaatccatcagataggtatcatctcatgcccataatcacccctgcctacccacaacagaattctacgtataatgtgtccacatcaactcgaacagtaatggtagaagaatttaaacaaggtcttgcagtcacagatgaaattcttcaaggaaagtcagattggtccaaactacttgagccaccgaatttctttcaaaagtatagacattatatagtattgactgccagcgcatcaacagaagaaaaccatctagagtgggttggattagtagaatctaaaatccgtgtacttgttggaaacttggaacggaatgaatttattactcttgcccatgtgaatccccagtcattcccagggaataaggaacatcataaagacaacaattacgtatcaatgtggttccttgggataatttttcggagagtagaaaatgcagaaagtgtcaacatagacttgacatatgatatacagtcatttactgatacagtgtacagacaggcaaacaatataaatatgctaaaggagggaatgaaaattgaagcaactcatgtaaagaaaaaacaacttcaccactaccttcctgcagaaattcttcaaaagaagaaaaagcaaagtctctctgatgtcaatcgaagctcgggcggacttcaatccaaaagattgtctctggatagcagttgtctggatagctccagagacactgataatggaacaccttttaattctccagcgtccaagtctgatagcccttctgtaggagaaacagaaaggaatagtgctgagcctgctgctgtaattgtggagaagccactgagtgtaccaccagcccaaggactttccattccagtgattggcgcaaaagttgactctacagtaaaaactgtatcaccccccactgtgtgtaccattcctaccgtagtaggacgaaatgtcattcctagaatcacaacacctcacaaccctgcccagggacaaccgcatctgaatggaatgtcaaatataactaagactgttacacctaagagatcccattccccatccatagatgggactcctaagaggttgaaagacgtagaaaagtttattcgacttgaatcaacatttaaggacccccgcactgctgaagaaagaaaaagaaaatcagtggatgccattggaggagaatctatgcctattccaactattgatacatcacgcaaaaagagactacccagtaaagaactaccagattcatcatctccagttccagcaaacaacatccgtgtcatcaaaaattccattcgactgacccttaatcgatgcagccacttgttttttaaatagaagtggctgtcatacgtgaaataaggtgaaagtgacagccttcagtctaataaccttgaagtggtttttgaactgtcaaactttgacctgtagatgctgtagcattctctcactgattgctacatacacttctctgaggatcacctgctgtcaaattgccatctacagtattacagctttgcatttgggggttttactgccttaactttcaatgcttgttatgggaaccagttcttagccacttggacactgataacaagtcctgaactccttttttgttttgttttttgtgtttttctttttttgtcttatgttgtaatcattgtatagagctaaaaaaattgaaaacaaacaaaaaaattgtcttgtattttccaaatgttaatacatttactttagcattgaagccactttgaaacctgagataaatgaatgtgaggtatcttttctgctttcctcatttgtgtagatgtactgtctgttctgttgatttaaattatttttttccagattggcacatgaaatatttaaacttttttgtgtgcctttctgtccaaatgttgcatagttaccagggaagattagtccagtgattacataagagttgggcaccataaattctctatattttgcctcccatggaggcctttgaaatgcatctttattaaaaatcaaaatataaccaggatactgaaagtcagtatatgaatggtaaaattgttacatatcctatttcatgccattcttgttagttgactggtattttttactgaggagcaactcattccagcatcaacaataagataacctttaagtatggcacacttgtatttttgaggtgtaaaattaacttggcatgataattcctgatcattatttaccccacaacttcaaatagtttcttcacggactaggcatgcagaaataagcagtggattttattgaaacctaaaggcattttgaatgacattgttaccaaccattaattggctcaggacctttgtaatttttatttaactatatgagttgtctttttttacgctgcttttttcaatgcatttcttaatattttttaagtttcatgaatgcatgctcagtttattaaaatccataaccatgtaattcttgtaatatgttgattcagtgttttgtaaatgaagtcgtatgtattttcagagtatttttgtatgtactgtaagataccatcttttcaaagagaaacgtttaaaaccttta

SEQ ID NO: 1402 - protein, 741 aa, Homo sapiens
MKEMSANTVLDSQRQQKHYGITSPISLDKEIDHIYTQKLIDAMKPFGVFEDEEELNHRLVVLGKLNNLVKEWISDVSESKNLPPSVVATVGGKIFTFGSYRLGVHTKGADIDALCVAPRHVERSDFFQSFFEKLKHQDGIRNLRAVEDAFVPVIKFEFDGIEIDLVFARLAIQTISDNLDLRDDSRLRSLDIRCIRSLNGCRVTDEILHLVPNKETFRLTLRAVKLWAKRRGIYSNMLGFLGGVSWAMLVARTCQLYPNAAASTLVHKFFLVFSKWEWPNPVLLKQPEESNLNLPVWDPRVNPSDRYHLMPIITPAYPQQNSTYNVSTSTRTVMVEEFKQGLAVTDEILQGKSDWSKLLEPPNFFQKYRHYIVLTASASTEENHLEWVGLVESKIRVLVGNLERNEFITLAHVNPQSFPGNKEHHKDNNYVSMWFLGIIFRRVENAESVNIDLTYDIQSFTDTVYRQANNINMLKEGMKIEATHVKKKQLHHYLPAEILQKKKKQSLSDVNRSSGGLQSKRLSLDSSCLDSSRDTDNGTPFNSPASKSDSPSVGETERNSAEPAAVIVEKPLSVPPAQGLSIPVIGAKVDSTVKTVSPPTVCTIPTVVGRNVIPRITTPHNPAQGQPHLNGMSNITKTVTPKRSHSPSIDGTPKRLKDVEKFIRLESTFKDPRTAEERKRKSVDAIGGESMPIPTIDTSRKKRLPSKELPDSSSPVPANNIRVIKNSIRLTLNRCSHLFFK

SEQ ID NO: 1403 - DNA, 1828 bp, Homo sapiens
gagaggcaggctgggaagcggcgccatattggcgtcggccgcgctgtattgtcataaatagagccggttttgtggtgttttcactactcggttggatgcctcagccatagtaagtgggaaagtgagcgagcaagcgagctactagcgaccggaggaaagtgaacagggggagaagggaacagcaagaacaggactccagagcgataaacactcgctggagagggagacgcaggaagcgatgaaagagatgtctgcaaacaccgtgctggacagccagcgtcaacaaaagcattatggaattacctccccaattagtttggcatctcctaaagaaattgatcatatttacacacagaaattaattgacgccatgaaaccatttggagtgtttgaagatgaggaagaattgaaccacaggctggtggttcttggtaaattgaacaatttagtaaaagaatggatttctgatgtcagcgagagtaagaacctcccaccttctgttgtggctactgttggtggtaaaattttcacatttggatcctataggcttggagtacacaccaaaggagctgacattgatgcactttgtgtagctccaagacatgtggaaagatctgatttttttcagtctttttttgaaaaattgaaacatcaagatggcattagaaacttaagagctgtagaagatgcctttgtacctgttataaaatttgaatttgatggtattgaaattgatctagtctttgcaagactggcaatacaaaccatatcagataatttagatctaagagacgactctcgcctgagaagccttgatataaggtgtattcgcagcttaaatggttgtagagttactgatgaaattttgcatttagtgccaaataaagaaacttttagactcaccctaagagctgtcaaattatgggcaaaacgacgtggtatttattccaacatgctaggattccttggtggtgtctcctgggcaatgctagttgcaagaacttgccaattgtatccaaatgcagcagcatctactttagttcataagttctttttagttttttccaagtgggaatggccaaatcctgtgctgctgaagcaaccagaagaaagcaatttgaatttgcctgtctgggatcctcgggtaaatccatcagataggtatcatctcatgcccataatcacccctgcctacccacaacagaattctacgtataatgtgtccacatcaactcgaacagtaatggtagaagaatttaaacaaggtcttgcagtcacagatgaaattcttcaaggaaagtcagattggtccaaactacttgagccaccgaatttctttcaaaagtatagacattatatagtattgactgccagcgcatcaacagaagaaaaccatctagagtgggttggattagtagaatctaaaatccgtgtacttgttggaaacttggaacggaatgaatttattactcttgcccatgtgaatccccagtcattcccagggaataaggaacatcataaagacaacaattacgtatcaatgtggttccttgggataatttttcggagagtagaaaatgcagaaagtgtcaacatagacttgacatatgatatacagtcatttactgatacagtgtacagacaggcaaacaatataaatatgctaaaggagggaatgaaaattgaagcaactcatgtaaagaaaaaacaacttcaccactaccttcctgcagaaattcgaatagtgctgagcctgctgctgtaattgtggagaagccactgagtgtaccaccagcccaaggactttccattccagtgattggcgcaa

SEQ ID NO: 1404 - protein, 506 aa, Homo sapiens
MKEMSANTVLDSQRQQKHYGITSPISLDKEIDHIYTQKLIDAMKPFGVFEDEEELNHRLVVLGKLNNLVKEWISDVSESKNLPPSVVATVGGKIFTFGSYRLGVHTKGADIDALCVAPRHVERSDFFQSFFEKLKHQDGIRNLRAVEDAFVPVIKFEFDGIEIDLVFARLAIQTISDNLDLRDDSRLRSLDIRCIRSLNGCRVTDEILHLVPNKETFRLTLRAVKLWAKRRGIYSNMLGFLGGVSWAMLVARTCQLYPNAAASTLVHKFFLVFSKWEWPNPVLLKQPEESNLNLPVWDPRVNPSDRYHLMPIITPAYPQQNSTYNVSTSTRTVMVEEFKQGLAVTDEILQGKSDWSKLLEPPNFFQKYRHYIVLTASASTEENHLEWVGLVESKIRVLVGNLERNEFITLAHVNPQSFPGNKEHHKDNNYVSMWFLGIIFRRVENAESVNIDLTYDIQSFTDTVYRQANNINMLKEGMKIEATHVKKKQLHHYLPAEIRIVLSLLL

SEQ ID NO: 1405 - DNA, 116446 bp, Mus musculus
  misc_feature (1)...(116446): n = A,T,C or G
tgaggagtctggagacctggctcagcagttaagagcacttgttgctcttgcagaggactcgagttcagttcccagcacccctgaggtggctcacaaccatcctcaactccagttcctggatgtcaaggagacctgatgtcttcctctgaattccttgggcactaggcacacttgtagtgcatatacacacatgcagccaaacacacacactcacacacacacgattttattttcctctttcaatctttttagacaggttctcacagtccctggtctggtctgtaacttactatgtgagccagactggcctcagaatcacagaggtccacctgcctctgcctcctgagtgctgggtgtaaaggtttgaaccattacacctgttgaacttgattggtttttcagttagcatttatcacattgtccaggcagagtgatgatctggtaattctagctctgcacagtgcttagtgttatctggtcacaccttatacttatccaaggtctagtttttgtcttgatctattaggcttggggtggcctaatctcaggttctgagtaagtgttcctgttcactagagcagtgagcccagcagtgaggcccaccagcatctgccatttttactttccagtgccagggtgagacttgaaatcccttgtggccttcaagaccatatagcagtggttctcaaccttcctaatgctgtgacccttaaattcatcatgtcttagttagggtttctatggctgtgatgaaacaccgtgaccaaaaattaagttggtgaagaaagggtttatttggcttacacttccagatcacagtacatccctggaggaagtcaggtcaggaaatcgagcaggtttggaacctggaggcaggagctgatacagaggccatggaaaggtgctgcttactggcttgtttctggacttgctcagcctgccttcttatagaacccagaactaccagcccagggatgataccacccatgagggctgggccctccccactgatcactaattgagaaaatgccttacagctggatctcatggaggcattttctcaagggaggctcctttctttctctgtgatgactcgagcttgtgtcaaggtgatgcacagaaccagccagtacaactcccaactgtaaaattatttcattgctactttataactgtaattttgctattgttatgaattttaatgtaaatatctgatatgcaggactatctaatataggacccccgtccacaggttgaaaactgcccgccctacataatctggcttctgcactctttccaggctatctccaccacactgtcacattcccataacactaactccttcctggtcctcaaatgctctaagcttgttttaccaccaggacccttacatgtatggctgacctccctgacattcgcttcccaggtaacatttcttaaatcactttttaaatatcacttcctcagagagccgtaccctggcctctcccttttccatttgtgtcaggacaccctgtctgtcatatttctgctctgttttctttggtcttacttacttaacacaggttgctttcctgcatctctgtgatgctgccagatccaggagagcagagatctcattgctccctaagatatatccttactaccttaccgggcttttcccaagatggattctcaataaatgtggattaaaggtatcagcttaggagtggggaacaggcgatgaaggtccagaatggagtacacacagacttgtgtgcctggccttgtgggaaggagccacgcccacattgtgggaggtcctcgtgggaaggagccacgcccacattgtgggaggattcttggcagaacacagaagctggttcatgaaccgcactgccttcctctgcagtgcacgactgctctgctctggtgtgactcgtccaggactgaggcatctttggctctagaaatttgtttcttcaacataccttgttcatttgtagggtgtcagaggaacataaacatgatcagtggagctgggaggcgggagtccagctgacagcccacatcttgttttctgctagtgatgcctgccagtctattgtaaagcactggccatgtatagcactggccatgtatagcttccatgataaagcctcaattctctgaaccatcaaatccatgtgggctttgaacaggctcacagaggagttaagtgtgaggcaaccaagaaaactccatccaagtctaagtggctgtgtcttctgtcaatcagaatgcccctttgtacttaaatatcttcgaagctgcagctaggttatgcctgttatgtaaaactccagaccccttttccacatatgcaaactcaagaagcctacacccactcttccctggtgggatattctaagttaggaaggaataacttaaaagggaaattcatccatgatttgggaatgtaaaagggtaactttaccccatgaaaaaatctaccacatagaactcgctacgcttccactgaaattgaaggcatcccacctgtctttggattaagagctccaaaacaagacaacctgactgagtaggcttctcacccaaaacagacgccccagtagacaaaaaatattgttctccctcatttccagtatatctgctggaggtcaagaatccatgtattcatttggggaccaggtaggaaacttaagttacccaacaaacttggtctgtgttcatgacaacagatcaaggagtgctcttttttcatttttgattatgcttaatataatattttccagttccatccattttactgcaaattcaaactactttgggattccttctcacccagaatggctaccatcatgataacaaatgacaagtgtaaagaagattccagaaagcggaaccaccattcactgttggtgggagtgtaaaccggtatgacctttatggaaatcagcttggatttacatcataaaactaaaaatagaattatcatatgacccagatatatgacttctgggcatgtacccaagggactctacatcctacctcagggacttgccgatccacacttattgttgctctatttataatagcaaggtgatgggatcagcttagtcgtccatcaccagatgaaggggtgatgaaaatgtgaaacacacataatgggatttcactcagacacaagaaaaatgcaaattattaattgttaaatttgtgggaaggataatagaacacatgaggtatcaaagtagaagtagttacaggtcgtggagggatacagagggaaagtgagggacctggaggtaggggtagatggaggtttagggagaagataacctactcaaactcagtgtgtctaaaatatccataaaaaaacctgtgatgttgcaagctaactaataatagaataataaagggtaaagaaatattattttgatgtgaatggacatctaagccccttcacacatgtgcatatgcacgtctttcctatcgtgtatcttcttggtctcttttatttccccatttttggtggaaaacaagctccaatagtgtcccattgttttgaccttaagaaaagccactacacacacctaaaaatcagggccagttgatatgtagactcaattttggggaaaaggagaatactgtgcatgagacaaaccagtgtatgtcctctggctgaaggatggctgctagcctgacctccatgtctctgtcacaaggcagactctagagttattttaaaaccagaaatgccagaatttaggtgatatgcttccactgctgaacatcagcaattaagaatatattcaatactgagagacccccgatatggctgttcaagaggccatcttcctatttggccttgcactgctagtgttggggtttgttccatatacatgtctctaggtgaggatttacttgctgccaatcatacacagaaaaggatgacgccatcacacacacacacacacacacacacacacacacacacagaaatgagtctcagcaactttgcaaggagagaaaggtcatcctccagatggactttgagaagtgaacagctctggagcatggctattgccatggaaacaatttaggagacagggaacaggtcaatctggagaagaaggggaattctctctggaggatggtagaacatgcagactgtaggactttgtggcatatttaagagtcttcagagagtactaactggtcactagttgagggtgattgtgtatgtagtataggagaggaatgggtttagaaatggcagaggagacaggaagtcaagctctagaggggaattagagcctcatcatggcctgtgtatgtatctggtgttcttgaaaaatattgttctaatgggtatgggagattcattgagaggtatcagttagggccttgacaatttagtcttacaactgagagagatcccattgctagccctatggcatgctcattaacagtaagttttaaaactgcacttaagggctagaaagatggctcagtgattaagagcactagctgctcttctacagaaccctcagttcagctctcagcaatcacatagcaggccacaaccactgtgaccctggttccaaggagactgatgccctttcctggcccccatgggcactgtgtacatgtagtatacaaacatatatacagccaaaacactcatacacataaaataaactgagaaaaaatagcagttagtcgtataaagtaagttattgtcttatttagggttttactgacaggaatagacaccacaaccaagacaacacttataaggacaacatttaattggagctggcttacaggttcagaggttcagtccattatcatcaaggtcagagcatggcagcacccaagcaggcatggcgctagaggatctgagagttcaacatcttgttctgaaggcaaataggagaagactggcttccaggcagctaggatgaagatcttgaaagtgccacacttcctccaacaaggccacacctcctaatagtgcctctccctgggacaagcatgttcaaatcaccacagttgtcataagcaggaaagctttcaacccttggtcttctcccatccttactcctacattggcttctagatattagctgttataataaggcagaatcacatgcctgtcattatgcatatgttttcacagtatccctgaatttgcctccaaagactgaaatatttaccatcttggctagttccgaaaaatgttagtcagtctcagatgtgtagtgacaaattgttatactattgtgatgactgagacttgacaaggctttcaatcaaatatccaccaaggtgttgttacaaactttacagatgtgatttccacccaccattcattaggccttaaaagggatgattctcagtgaactaggtgaatttgacacaattgccaaggaccagcttcggctaagtctgagagaaggagtatgagagccatgaagcaaatatctgcaagtcagttagtaggtccaagctgacagcttccattctgctgagatagctttctatattgcatgcttgtgctctctctctctctctctctctctctctctctctctctctctccctccctctctatcagcctgtgtatgtctgtctctctttgtctctctgtatctccctgtgtccttgtctctgtctctctctgtctccctgtctctgcctctgcctctgtgtgtgttctgctctgcccttgacagctttttcttgatattctaaaactctctggttgagacagctagctttctgcttgagacagctctctctgctagtaaaaattctaaaatctctctagatagctcatgggttttttgactgaagtcagaaaaactaatataaaaattttttggatcttcctaccaagtaaaaaattttgttagaaaaaaattctaaaagtaattcttgggttttctgatcaaaataagaaagcaagaaaaagttctaaaagagctgtgttcactcttcagacagccttctctagacagctgctactaaaaattctaaaagaggcatggtcactctctaagtaagtcttgggcaaggtcagaaattttgttagaaaagattttaaaagagctataaaaaaattctaaaagagctgtttttgctctccatggattttctgactaaaaccagaaatcctgttagaaaaaaaattcttgaagagttgtgtttgctctcgagagatctccagacagttcagctctcactacagaaaatattctaaagaactgccttctctttctgctcgctcatctcatgaagaccaaacagcccagtttttaatttacgtatcaattcatttatttattccaggttcccttttcattatcctatgaatcagcaccccatgacccaaccctttgattcttaggaagaggatagaaagtacctttttttttttttttttagatttatttatttattatatgtaagtacactgtagctgtcctcagacactccagaagagggagtcagatctcattacggatggttgtgagccaccatgtggttgctgagatttgaactcctgaccttcggaagagcagtcgggtgctcttacccactgagccatctcactagcccaccttttttttttttaatattgcaaaagaattcagagatttgcctgcctttgtaaactaactcctgtgggaccttgccctgagtttacctttctgaccacccctggacctaaattagctctgccccatgttgatcctgaactcaggaatctgccagcatttgtaaggataaactaaccaaccaaccaaccaaccaaccaaccaaccaaccaaccacccaaccaatcaccaaacaaaaaactttagctatgcaggagattccttgtgctcacaacgccctaaatctctttatctccttccttaatatctttctcacaagctggctcatagcacagttgcctctgttcctttagatctgtaaagccccttatacagttcatattgcatccttatatttttgcacagttgagaaattatatattttccaattcatatatttagagttcttttccgcagctttaaggctgtcctgaaggtcccagtgtttaccattttgctgagacattagccacaccctcacctcccagactcatgctgtctctgataatcatggagttggtaacattaccaggcaggacattccttgggcggggcggggggggttatgaaatgctgtacattgttatacaaacaagccttctacccacagcagccattgaccctcctggaggaccatgcctgctggccctatcctggggcaagaaccatgtcatctgtccctaccaaggccatggtagcactccagtgagttcaacaatcagtcagttcacaggctttaaagacaaggctgggggtgccacaggctcagatgtatatctttcagtttttgaaaaccaatgggcgatatcaaggaaataatataagtactttataagagaactgaagctttctgtgaaatctgaaacacagatttcagtcttaatagatgcaatatttatacatatgtacgtgcatatatgtgcatgtgtgtgtgtgtgtatgcacgtacatgtgtgttgtggtggtgaataagaattgtccccattaggctcatgtattaaaatgcttggttcctagttggtggaactgtttttttgttttttgtttgtttttgttttttgagacagggtttctctgtatagccctggctgtcctggagctcactttgtaaaccaggctggcctcgaactcagaaatccgcctgcctctgcctcccgagtgctgggatcaaaggcgtgcgccaccacgcccagctggtggaactgtttaggaaagattaggaagtatggccatgttggaggaggtgtgtcactaggggtaggctttgaagtttcaaaagcctatgctgttagcattctgtctgaactccaccccctgcagttacctggcaatagccaggtaagcctgacccactataaaaggggctacttgtctcctcctccctctcttactctttcttccctcttgcttttcccttgctcgtcctttccccttccctgaccctttcttcatgtgctcatggccatggtcggcctttacttctctactctttctctctgcctttctctgactctacaaccctctaccctcttagctcccctccctatgacctaaataaagtctagtctatactatactgtgccttnnnnnnnnnnnnnnnnnnnnnnnnnnnnnnnnnnncacagccccatagaacatgacttatacctctttatctttttataaacacatcacatgctgttctcaggtaactctctgcctcatgcttgtggatcagatataagtgttctactactgctccagccctatgtcttcctgcctgctctcatggtccctgccaagatgatcatggatggtaccacgctcttgaactgtaagccctaaattaaatgctttctttgtaagttgccttggtcatggtcagtgttttgtcacaacaacaaaaaatgttactaagtaatgaatattaaatgcatacacacattctcctggctttgatctttccacaaagctgtgatatagctgcttactgtggctgctgctgctgtgctgtgctgtcttccaaatcttctagctcttacaagggccactagaacacttgtgactattcccaagagattccccaagatttggcctgttgccaagggagagtgggggagtcattagaaccccttctgggatttcagccagtcctttctgagtgtctctggcagctgcatgtaactttgtctcaggcatacatagtcacatggtctgagaggtgacagagtgtgtgatggattaatgaaagaggagactatacctatgcagctatggggaagttctcatccaatgtggggtgagacattttagtgatgtagctgttttggggttcacctatgctcctttaagtaacccctcagttgtgttcctagaagcaaattcaacgaactctttgatttcccaacctagacttgagaggagtcattgctaaggtctgtcattagagccctatctgtggtgggtagagggtttcatgtgttcctagggaaaagtaatctaacagatgcacccaacttgtgctgtcagaaactgaaaagccaataaattaaaatgaaagaaaattggtattttgtgaaaactgtcagtagtgattttgcctggtctttcctaatgtgtctggggtagggcagaaagaggttatgggaaatggtaataaagaaagaaaattcaaggagacttagatcattgtgatggtagccctgagagatattttcctcttcaattgaatctattccaagagcaaacttcaggtttgtggggaaatgtctgtctaattcaccctggctgtctcttgccctgcccacgcttgctggtggtgaaggtgcccagacctgctggtgtgcctgagtagtgttagagggaggcttctgggctggcatcggattcccagttgggttcatggcacagaaaggatgctaactaaagtgaccccatctctagcgtgtcactcactgagtacaggttcttctctaatcctcaggaaaagcaggtgaaggggcaatcttaccccatcttcctgatgaagaacccgaaacaccgagaaatgaagatcagcccccaaagctcatgcttagtcactaacagggttcagaagtcagggaaactctaccctcgcggtctgggttggctttaagtacctgtatgccttgtagccactttcctccggaagagacaaatgagggtggtctccaaattttgaaggcaatcttctagcccttggctgtgtgtgcccctgctggagaagaagggggaggagggagtggggacccagaggaggggaaggcggaccttgagagagagagagtttaaaaagaggaaggaagtggggccctgcaaggcgcctaaccaccccagccagcttcttcactagagaacaggaggctctcaaggctccggtcttgccatggccccctggcgcaaaactgacaaggagcgtcacggagtgggtaggtgtgggcaagtgtgggcactgggtctgcgctgcggcagagggcaggtggctggaggcagatgtgatgggacctgcaggatgggtgagggcagggcgggccatgctaacttatggtctggaacgcagtgctttctctctgctgcagtcgccgggttgaaggagaaaatgaaggcagagaaagtatattcttgccttcagcctctcccaagtgcttgctcacacatccttaagatgaggtggccccgcagctctgtgtaccagactttgctttgcacagagcactctccattagccagtcttcaagccaccatggctctgtccatctcgtttgctggtttgctctcggtcaggtgactctgatctaactgctctaatatcccaggtatccagtttggggccgggacaaagccaatggggtctttcattagagcttttgagagagtgagtcctgtcaaattatcggagaaaacagcctcatcagcttcagccatctaagctcccagaagcctctgcttcaaactgggggcggaagtggtggctgggggaagggaggtgtcaggtaatgtgactctaagtggcaccagtgatgcaatcctgccaactctaagtgagaatttaaaggttgactgggggatttccatactgccagatcgcagatctccccaagagaggatgcttcaacaggccgggcctgaggcagctcagaggtgggagtgatagatgcagggtgtgtgtgtgtattcatgagccacagtttgagagtggctactttgggggttctcagatctatccatcctctacaggcaagcatttggcactgtgaggcactttgagatgaaaagtccccagcagagaactgacaagtcatatctgcaaggggtctcaggttctccatccataaaatgggaagtttgaatttgactcaataaaggctcctttaaaagttcaaaacttctccaactccggcctttccacctggggtatccccactagcaatttatacaggaacagaaggactgtgaaaagggcaggggatgtgggcggggcaaccttgtgtcttagggcaaattagctggcctggagaagcacgctcagaaaggaagggctcttaaatctgnnnnnnnnnnnnnnnnnnnnnnnnnnnnnnnnnnnnnnnnnnnnnnnnnnnnnnnnnnnnnnnnnnnnnnnnnnnnnnnnnnnnnnnnnnnnnnnnnnnnnnnnnnnnnnnnnnnnnnnnnnnnnnnnnnnnnnnnnnnnnnnnnnnnnnnnnnnnngcaaaaggttagagaagtgtgaggagttgagacagctgggccatctctgggtgccttaggcaatccctaccaggttattttccattcctgctacagccttgccacaggaactccatcagagctccagagaaggcctggggtggaagcagagtagactcctccccaggcaaggcagtgtgcttaagaaaggcacagcttctgccttgaggagtctggagaaggttagaagtttgggttgtgaagtccaacttaagttcaaatctagacttgtttcttcatctgtaatgaggtgaagatgatgatgaggaggaggaggaggaagacgacaaagatgatgacggtctgatgatatggacctggggtcataattgtaaagcacttggtaagactcctggccaaaatcaagggacaactacagaatcaagatggatttaaaaggatggctctaatgccaatttcagagcagttgctcctagtgagaaggtagtagtttaagtttataggacctcttctcgtctttgactttggaacatctatgtgagagtgtgttattattcccactttataattgaagacccccaggttcatgtaacttggtgataatgaagctggcgcttacattccactgccctcagactctagacttaagtactatagacattcttcactataccaggagggcccttgaaggaggatgtcatggtacaagtagaaaacttgtgagtggcagttgggtcaagcaagaagtctgattcggttttagtagatgtttgtagagaaaaaacccagaagagggggttgcttacagcagagtcagaggggcttgagtggacttccttctgtgggtctgttctgtggttttttagtaggaatatcctatataagaagccaatgaaatcatttgagagatgggtagggattggacatagactagcagggcgatggataataattctgcatgtctctaatttcctacatagtaggtccaacccaaatctgcttaaaattagcatgacctttggcaattgcaatctcaatcactgtgtgagactggccagtgatgaccttctccttggaagaggtgggggaagggatggagggaggaggcagaaagagaaaatggtgtcagttgggcttaagtttatgaagggtgaaagcaaacctcggaagtagtggattggttcaggtacacctgcattttgctgctcacaaaatccatagaacattggctccaagacagacttgatcgactaacactcattccccgttagtttctctcctgtatttaccagtcacagttgctgtcctcggatgtgtccacccagaggtgctgtgagttggcaagatggagcagcccattatatctcccatgctgcttccttggcctgcacactctgcctgcagaagctccactcaccaggtccttttggcaagcatcaggaccgctaaagggaacgtggaaggcctggtctttccctttaagaacacttttctgaagataaacttcacatttcctcttagagccttatgggctaaaacctaatcacatgactaaacctacctgcaagaagaactgggaaatgtagtctatattagagtcagccatgtacccagctaatatttagtaatttcacttatgattttatgtttctggaagctgagagaccaagatcaacctgccaggaaggatggtttcttctgtggctgctagttgatggtcatcagcctttttccacagctgctcctctcaacagccacacctttggtgtctcattgcctgctcacaagaacactggtcagaataggttggcgcctccctaagggcttcctttaactttatatctctttaaagtgcttgctgtagatatggttctattccaagatagtagggatttggaatttagcatttacatttaaggagacatagttaagtccacagtggtctctgccatggtggccagggactataagttggtccccaaggcagaagtcttcagattgagaatcccagtggagaaaatggaatgatatttcctctaaagtggagcccttaggcagatttgcatggagcctctcctatgctcagaggggagggatgaaaatctctgttctctccctatcttagcaaaggacagattaacaagataaagaatgagcagaaggttattagagtgtacatcatgctaatgcatggagcacccaggaaagagcagctcagggttgctttgtgcatgctcttaaatggcagttaaccagggagaaaaaattctcagccaagtgccaggataaaagcaatgggtataggtttccagcggagactgactcaggggagggctcgctcagtccatcttggcgttcacttcctgtggtttgcatggccacagaatgccccttcaagggaggatttatggttttcctgtttttagaattacttaattcttgtcagagaagagatgatccaccaaagtttctctgtgtagctctcaagtttcgctttcttctagcttaagaaagaaagaaagaaagaaagaaagaaagaaagaaaggaagaaagaaagaaagaaagaaaaaaggctgggagagtggtgtgctttgaggtggcatagtttgatcctttaaagatgaggtgtttgtcctctacagcttgtctccagctctagtttctgagggggtgaggggtgatctttcctagcctcttttttcaagtgctggcgatggctggtagttggggtgtttcttggtttgttagtatgtctcctccatcttcacccggcatctcctccctttcggtatgcccctaccttccctttgtaaaggagaccactgagctctattggactagaggaaaccctaatgatcccctttaaacttgattacttctggaaagtcagtgtgctgagttcacgttcttggatacttggaatgaggacaccgaggtcactctgtttccaaagggtggggcaagatccaagtcatggcaggctccgtagatgcagagaagggatggtcttctgtatctctgtgagaaggatatggaagggctcttgtctacttcctagttccaggatgtggaactgcttaactcagaaccttggacagagctagtttgtgctggaattttattgtacactgggttcttactatgaggggcaatagtcattcaaatacttcattttagatatgtgtggtgtgtggcaagtgatgtatttgaaggctaaagggaatcacctagaaatccagggagtcagcaagaagactgctagacatgcagccaggcctcccgaaggctggaacttgggcagccatgagaaccaagtcctcctctcctgacttccaagactctctaaacacctcagctcccctctccagactatccttgtcacccccctctgagtccaccactctttcttaattttaatattctcaatcactccaccttgacccttgcttgaaatctgtatggtttcagtcaaccatagaaccgtctgtgttgcaagagggaagatccagagtggggacccaatttacccaattcaagataaccacccataaaacaggtcacaattttgagaaggagcaaggagatttgtatgcgggggatgggggtggggattgaagaggaaagggaaggggaaaataatgtaattctattttaattttaaaaaatgaaaaaaaaacaaatcttatactagcacaagaaatggttattatcttattaaatggttactatcatacttgggaactcaaagaatttattttgaagtctgtattttacagaaacaaaacccttttataaaatcaaagcagcaaaaaaaagaatataaatactttctaatgaatattttgatttttaaaaagaccacccaagtcactgccaacctacatacaggttctactctactaggagtgttgtcctggcctagttcagtttactagggctatagttgggtcacatgacttgtcacagtactcgtctagctggagctccgtggagaggagcatgccctctgcatgggtggcatccgtgcagtatgcttccctaatagtgagagtgaacacttctttagaggaactgactccactgctttagtcatcaaggcaacaaacaactctttttactcatttgcttgcccactagttcattcttcccttatttcttacaaagttgttggtcatctcccaagtcccaggcatagtgttagtcaccaaggctgctagaattagccctaaatgggtcttaccctttgggagcttatagtctggtaatgaagacaaagggaccttgtgagtcgatcagcaagcagacagttagaaactgccaaaataaatggacacttatccatggatgagcatatcaccgagaagagtcttatcatggatcatctgcaggtccctgagcagtgggaacaggattctaaaggaaatacttgggggcatcctaggacacctgtctttggaccaggggctaactgtgtctttggacctgcctcaagatgttcatctggtgcaacaaaagcacagggattgaaagcttcgtttcctcccaatgctagttttttggtgcctggcctcttcctttgtgatgtgtcagcaacttggggtcatttagacaatacccggtgggttggtcggttatgcccatgtaaagacctaaagacctaaagagtcccagttatatgggaatctcatgagtcaatgtctggcttggttccgaccatcatgtctaggtctgaaggagctttggctgaaagatgcattttccaaactcagctatttcctgagcctcatgaatttgctgtcttttgagacaggaagtgtggtgctagaatgttctgctcatttctgggtgtccggattggctgcttcttttaaagcttgctgatctttaattgtccataatgcatgagtgtcacagtttgtattctgcagcatatattgaacaaatgggggtgatgctgtttgccattggcacccaaccctagagggatctgggtagagacacctcaaatgtcacctctaataggcacttcctccctccttccattcctccctctttccttccctccctccctctttttctctccctcctttcctccctccctcctttcctccnnnnnnnnnnnnnnnnnnnnnnnnnnnnnnnnnnnnnnnnnnnnnnnnnnnnnnnnnnnnnnnnnnnnnnnnnnnnnnnnnnnnnnnnnnnnnnnnnnnnnnnnnnnnnnnnnnnnnnnnnnnnnnnnnnnnnnnnnnnnnnnnnnnnnnnnnnnnnnnnnnnnnnnnnnnnnnnnnnnnnnnnntccctccctccctccctccctctctgcctccctccctgcctcactccttccctcctataattggtgtgagttgaagagcagtcaggctgagtcactgagctgctgaagatgtcctgcttattttgttctcagagaagcacatcctttgtctctctgccccaacaaggatgaggcagattccacactggtttaaattcacagtggcagaaactgatcctggaggagcaggatgtgactaacatatggatagagataccgtcacaaatgtctctctagcaactgctcggagaattcagagttctaacaatacatggcgatgttaggtcatgggtcacactataggaaagaaagatagggttctagtttcattgtaacatgaaggtggagggtggaatgcagagggtgacttgtggtggggcagaccctgagacaccctcactggcgtgatcagccactacatagtggaaccactggtttcagccaaatgctgtgggttcacctggtgtctgttttcttttctgttgctctgaagagacattatgaccaaaatgacttataaaagaatacaattaatttgggggtagtgggtccagaggattagaatccatgtttgcaaagcaaggagcatggcagaaggcaggcaggcatggtgttggggctgcagctaagagtttgcatcctgatctataaagttggaggcagagagggagagagagagacagagacagagacagagacagagagacagaggcagagaggcaccgaaaaagagagagagaggagggagagctatctgggattggtatgggcctttgaaacctcagtgcgcactcctggtgacacacctcctccaacagggccataactcctgatcctttccatacagtcccaccaactgggcaccaatcattcaaatatatgaacctccagggtccattctcattccaaccaccacacctgccaagtgagattttgttctcccttcactggctgcagcagtaagggagtttcctaagggaagaatattctgattgtaaagcagaggcaatgcaaataaaagtctcaaggaggaagtccctctgctgtgtgggaggccgggtggctggattagaggtggaagtgtaagaatggactgtgtgggaggtggtcatagggagtaatgacttctgtgtattgtggagatgttatttttgatggaaaagtgggatgaagtatttcaggggttggggcagagtagtgaaatagcacatcttatactcgggctggcagtttcatgggatgtgaaaagggagttaagtgtcatagcagagaggctggtgacacagctgctgcagtgacctagatccgaggtggcggtggcctcacccttaagggtggctgcaggtgaacgacacagacctcactctggacatcacagtgtaggtggggcaagtgggtgtgagagacagaggtgtcaggggtggtcctaaggcttctgacatgaaaagctggaagagccagctgtgggatctgtctactcggtcttgatctaagttgtcaccagcctccctttaaacagtgaattgcctcacccttccatgatgcatttagaccgatttgtgtttctgtgtccaaacctcaccagtagcctggaggaggatgtgtttacctttccaggtgaggaagctgagagatgtttctagcccatttttgggtcttttgaagtcacacctcagccctctgtcttgttacttttcacacaggcaccatggtccacttcctattgctataacggaacaccacagaatgggtaattgtttaagaatagaagttgagcccacacctttaatccctgcactcgggaggcagaggcagaggcaggggcaggggcaggggcaggcagatttctgagtttgaggccagcctggtttacaaagtgagtagccagggctatacagagaaaccctgtcttgaaacaacaacaacaacaacaaaacaaacaaacaaacaaacaaacagaatagaagttgatttagctcatggttttggagactgggaagtctgagaatttggcaggggcatcttctcagagtttgctgagggttcttgcagcttacaaacatggtggagggcaccacatgctcggcctcacatgtgcaccgacttaagtcttcattttctctaaagtaactcatgacaccctggggtctacactcatgacatcatcaaatcctagtgaaaggacttgggatttacatttccaatccactagcttgggggggggcacatcatgtctgatttaataagcatatagtgtctttcccagtagatggtcctctgtttgagcacagagctccactgggaattcattctttgtccacccagcccaagcacaataggaaaatgggagggcagagaatctaattgtttaacagtgggtcccttgagagttcagctgaagctgcaggcccatctttccagaaaggatgcatatgtgcggtctgtgttatgtcagtcacccccatctgggcaagctcggtaatgctagggagacagtagacttggtgaccactctgtaaactgccacagtggatgtagccaaggctctgcatgccaaagtatgcttggacaaaggagctgccaagagtcagaaaaacattctctctctctctctctctctctctctctctctctctctctctctctctctctctcttctttctttttccctttctctctttctttcttttgtttgcaatctattcagatcagtttatttccacgatgaatagtgatacagcaaccctgcctttggggatgcagaccagtattaaatctctaaatgaggttacaaataccaccacagtcagtactaatctcctgtttctcaggctggggcaggggggccccttgtttcatattaccatgatcctcctgtagccttaccatatttccctttactcttctgttgaattgtctgggacccttcatagaatagaatctcaacatgccaaaactgaccctctctctagggtcgttgggtaacatgcttctttagttgttgttgattggatggaaggatgtgtggctggaaggataaatagatggatgagtgcatgggtgaatagatggatgaatggataaatggatgggtagatgagggaggaaccagggaggtagaacttgaagttttcccatttctgagccttacaaggttcagatgaactgagttactccatccagcctccatcttctcaccctactcctttccttccaagaggctgagccctatgaaagcaccatagctcttcaagtcctttcctgatggtgaccctttcagtcagccactgggccaatcccacttgttcacaccctggacatccactgagatggccctgctgtgtcctcacaggtcacgctgttgactcctcccccgcactcccccacccttcccacccctcccactgctcttcttctgctccttggcccccacccccgctcttctccaccctctccttctagtctcacttccttcacaggacctttctagctctctgagaggccacagctgctgtgcccggcaacttggcaccacagagttcaggctgctccttgtttctcttttgtgtgactctgctaccagatttcagagggttccagagaacaagagccatttagtcctctgacctgaaggattcatcagattgccgaggttttgaggttatgtggttgtcttcattctttctaactccacagtgtatatgtgaatgtaagaatgtgcacatgcatgcacatgtgtgtgtgcgcgtgcgcgctatggaaaacacccacatcattctaagcaggacttactcactttgctccagctgatactgtgagtaggacatgattctttgatatagatctctctcttcaattatacagtggagtgtcaatccatcttctgttgctataacaaagtacccaaagcagaatacttaacaaagaaaagaggtttacttaggtcacagctttagtggttgaagatctgagactgatcgttgactttgcctattcagtagcaggtgaggacttcagggctatctgtgctactgtggtaagagtggagatgagagccagaaaagccagagactgggaagtagctttctacttctttttataacacctttctctgggggaaataaacgaatctcatttccaaaagccataccctgatgacctgaccagcgtccactgggctcagcctcttggaggttctaccatttcctggtgttgccactctgaggcccacctccaattcctgagccactgtggtacaaactcagtccatgtgtgagccataacagatggttaagcaggttgtcgggcctctactattagaaagaacattcagccttctacctggccccaaattagggcaaagataagtatcaccagagggaaaatagtcccaaactgaggacctctggactagagaactcatagttgggggcccagcctgattcctgttcactgggtggggtcactttgattcactaaagatgacacagggatgtgcagccctggagcccaagctccaagactctccctggatggttcagtttccagggttgataggcatcccattatagcctcacaacagctgttttgaggattactagtttgggatttctacgtgtgtccttgctggagccagcctcaggtggttgcagtccttggaatgcctctttgatccttggctgtgagaacaatgtcttcatgggttctcattgagttttcactgctgatgttcctgggtgtagcacttgacgcaagagatgttcaagtcctttgtgtggagctaggcacctgagatgggagatgggagcatctttgatgaggaggctataatgggatgctggctgtaagttggctgaggaccaaggttatgagtaaactctcccatttgcctatctcatggtcgtgatttcaatggctctcattctgaaagccattttttttgtccatatttgtttgtttactgtgtgtgtattgatgccaaggttctagtgtggaggtcagataatatcttgtgagagttggttctttccttttgctatgtgagtcctgggaaacagaactcaggttatgaggtttgacagtagagacctttacccatcaaaccatgccaccagctcccgttgcagatgattttctgccttttccattgtatacttaaattgctggtaggggatgttccttacagagagtgaacaaggaccctccctcagcctggtcagagacaaatagagggtcagagataagcaatcacactcagcaaagggtggaattctgccctagagtttccttttggtaatttagacaaaataacagaagcaggtactctggtgagcagagtcacttccttagtctgttttaccctagcaaacaagctttgagaacagaggtcctcaggcaaagggaggatgggcttataagcagttatcagttactttcgtatttacaaccagcgagtccttggaacagatacatacatttcagcggaggcacagttacaaaatgttcccgagacatcttaagctgacagatttgaactctcttgcctgacatgagtgggcagggtgtgagggaaaggactccggtcaaaagccatgggagactgagcaaaactcagtataccctgctgccctccaagtgtgatgtgtgctgacctgatttgctgcataggcaacgccctatctgggtggtttccttctgtggaaaccacagttgatcttgcagtcccgtcagccccaaggccaagtcctgaggccaacctctggcttggaggagcagagagtcagtgcagaacctgcttagcaaggacactagcacactggcatgtgtccaagcaccagcagccagtggcgggagaagactgtaagccaggtcacgtgcagagggaatggagaaaccgctgggttatgcagaagagagccctgagccctggggctctctccagacttgctcttagacaaagacaaacttcactcaacggtgacccctccgtgccactgcctgcaaacggctgggaagtggggttaaaggtgacatgaagcttgcaaggagttagtggctctctgagtagctggcttttggagatcttgtaatactgcttaaaaaagaaatgtggctcacattgattgagctctgactgtggctgggtgttgatcctgcagacagtccagcctttcatgattaatatcgggtgggtctttttggaatcttttgacagagaataaaatcatcttcattgagaacaaggatggccatgtggaatcgtggccaactggaactgcaaatgaggaagcatgctaaaacgtactcccaggtgtcatgaggggtcaggggagtgttagattgcaggtggtgttttgttcatctggagttcggatgccttggtttttttgttttttgtttttttaaatggctgggtgttgtctcaatttctaggttacttagaggaaacaggaagtctcagaaatggttagtaagagctagtgaatcacagttagcttgctcttctgagtgcctgggctcagatagcacaggtctaaggatcagctacagatataatgggccagagagggccatcctactgcccttcagtgggagctggagatgctgaggcccaggaagatggagtctactattcagtgtaggccgtctggattacagaaagacaagtgtaggatacacacactcaggcaggcagaccctagctaggttcctctcttagccttgtgcagggcaccaactgagacctggtgcttgaggccagggccagtgaacgacaggactgaactcttgaggtgggatctgagaccctgcctcatgctttctaagcgtcaccacctcccaggaaatttccatccctgagaatactctcatctggaggttagggtacaccatagggtacaccttgcaccagacccagtttagtatcctaataacattgtttgaaagataccattagcacactagagaagtgcagatattcacccaaggtcacactcaactaaaaggcagagctaccgtccttccgcgtcaccgggctttctttgatgagtttagggcgacatatgttagagagatgggaggctgaagagggagagaggagagaaaggagatgagttgggagggggttgtctgtgacgcagaataatctatacaaagcctacagctgcttctcgcagggtgtgcacaggggcaagcacatgttatgcccagctcaggcactgtgtgagattaggtaactttactagcctctctgttcatcgcttggcatatggacactattctttgtacttggaagcagtgctctgaggattataaacacataagaggagagagctttgaacaatgtctagtccaaggcgaatgtccaaagaacattggttctgtcaggattactgtcggtctgcactcccaggtgaggcctggttacatacagtttctctccaggaaccctaacaacctgtgtaaagtgtaatttactcccttggttccccagatgcctttcattgtggtcagagctggcacaatgatgcctaccttaagacacagagaggaagtctggcctgctgctggcagctgccaaggcaggaaggaggctcctgggaacagacccactgtctacagggctcactgcccacatgtgaaagggccctgggcactctccttcctgcttaaaaggagagcagagctgtgagggcatggattctgcacctcaggaagcctccactcaccccatatgctggggataactgatgttctataatgacccgggcttccggaggttggactgcctatttcatccttgtcactgcagatgggcctgttgctcctgtcatgctgtggaggccatcctgcctgattcccctccaggctgccaatgactgtacatcactgagcgcatgttccatctatggccggcacctctcttgtctctggctccctgaggccaaacattcttctccccatcctgttcaccagctccccatcctgttcacctctccatcctagcagcacctcccctcacttcaggtgctcggtgcacagatatttcttggtaattctgactaaacacatgaattctcagcttgctgttttaaccacgctaagtcgcatagttcagtagcacagctatgtctccaatgcctagctgtacaagattgcatttctacaaccatgattctagtagccattaagcagtaacccctcgttctggtccagtgaccatttagctgttggcatctctgtgtttctctttccgatcttttgtataaatggaacatagaaaaacattcatggttctttgggtctcgttccttgtactaagtgtgtttttcttggatcatctgtactgtccatatatgagtattttgtacccttatctggttgaataatattccattgtgtgcatataccacattttgcttatccagctactgatagatacctgggttgtttcgatcttttagagtatgctaatagtgcccaataaatgctcacatgaaagtttttggtttgaattcttgttaacaatttggggtgtgaatccaggattagaatcgatgggtcccatgttaattctgtctgcctttgaagattgctcacactgtcccctaattgctatacatgattggttttcatgctaatttttgaggattacaatttttctgtatccccttcaaaaaaaattatggccataccaatgagtggtcatatcatatgaggtgatatgctgtgcttctgattggcagttccctaatgactttaatgccaaagacctttacatgtgctctttggcatttgcgtgtctctagggaaatcagtttttaaattccttcgtccatttataacagggtctgtgttgtcaattttgtgggtgcaatgtaagagttctttatgaaggtcggaatagtgtagacttttatttcagatctgatttgttgctgtgagtctctgagttaaccgctacccattgcaaaggaaagcttgtttgaaggcaaagagtagacacaattttatggctataaatataaacagctaaaggcactttgaagacacgtccacttagtaaagcgacagttgtaggttctcctctaaggtcagtgacttctccatccatgagctctgacttcgtaatttaaatacaacattctcccctctctaccctcactctaaaccctcttgagaacccctctccacccctctccactctccttcaaacccatggattaagacccactcaacgagagggatgtcatgcctggcatctgaagcctagatatccacttagaactaatggttgttagagaaaaatctgcaattactggtttattaaaccagcacaatccctataaaaaaatctataaacatatatgtttgtatatgcacacatattcctaaatatatcctatcgagttccagcccatgttcctggtgtatatgtttttagagttgagcctttggcactggatggccagttagtgtgctcttccctggccagggctgtctctcctgggcagggctgtttgtctgtcctgggcagggctgtctctcctgggcagggctgtttgtctgtcctgggcagggctgtttgtctgtcctgggcagggctgtttgtctctcctgggcagggctgtttgtctgtcctgggcagggctgtttgtctctcctgggcagggctgtttgtctgtcctgggcagggctgtttgtctgtcctgggcagggctgtttgtctctcctgggcagggctgtttgtctgtcctgggcagggctgtttgtctgtcctgggcagggctgtttgtctctcctgggcagggctgtttgtctctcctgggcagggctgtctctcctgggcagggctgtttgtctgtcctgggcagggctgtttgtctgtcctgggcagggctgtttgtctgtcctgggcagggctgtttgtctgtcctgggcagggctgtttgtctctcctgggcagggctgtttgtctctcctgggcagggctgtctctcctgggcagggctgtctggctgtctctcctgggcagggctgtctctcctactcccagctttcctcgattgtctgtgtttttctttgtttctgtaggattgaggccttcctggcttttccttgtccactggcatgtttgctggtgtcaaccttgttcagctcacacttccacagtcgtgttggtgagattttatgtgtgtagcttttaaggttaggagatgaagtcccacagcaaactccctgatcctctggttcttacaacctttctcctccctcttttgcaatgtttcctgagcctcagatgctggactgtttgtgtccattaggactgggctccagggctctgcgttttgagtgggtgtggttttctttagtggtctcagtctgctgcaatgggaaggttccttgctgagaggtgaagactacacttatttgtgagtataaggacaaatgtttatagattatttttagggattattctggtttagcaaactaatggttgtagattctcctccaacaaccatgaattcactagtactgagtgctgtgttttataaaaagaaagagaaagccagggatacgtttggtagaggtgcagtatggtgtggggggtgggggagagggtggaggagatggtgcctctgtggacccatggcaaggcattcctttgctttgaggtaccagccacatgatgtatagtatagaacagagtnnnnnnnnnnnnnnnnnnnnnnnnnnnnnnnnnnnnnnnnnnnnnnnnnnnnnnnnnnnnnnnnnnnnnnnnnnnnnnnnnnnnnnnnnnnnnnnnnnnnnnnnnnnnnnnnnnnnnnnnnnnnnnnnnnnnnnnnnnnnnnnnnnnnnnnnnnnnnnnnnnnnnnnnnnnnnnnnnnnnnnnnnnnnnnnnnnnnnnnnnnnnnnnnnnnnnnnnnnnnnnnnnnnnnnnnnnnnnnnnnnnnnnnnnnnnnnnnnnnnnnnnnnnnnnnnnnnnnnnnnnnnnnnnnnnnnnnnnnnnnnnnnnnnnnnnnnnnnnnnnnnnnnnnnnnnnnnnnnnnnnnnnnnnnnnnnnnnnnnnnnnnnnnnnnnnnnnnnnnnnnnnnnnnnnnnnnnnnnnnnnnnnnnnnnnnnnnnnnnnnnnnnnnnnnnnnnnnnnnnnnnnnnnnnnnnnnnnnnnnnnnnnnnnnnnnnnnnnnnnnnnnnnnnnnnnnnnnnnnnnnnnnnnnnnnnnnnnnnnnnnnnnnnnnnnnnnnnnnnnnnnnnnnnnnnnnnnnnnnnnnnnnnnnnnnnnnnnnnnnnnnnnnnnnnnnnnnnnnnnnnnnnnnnnnnnnnnnnnnnnnnnnnnnnnnnnnnnnnnnnnnnnnnnnnnnnnnnnnnnnnnnnnnnnnnnnnnnnnnnnnnnnnnnnnnnnnnnnnnnnnnnnnnnnnnnnnnnnnnnnnnnnnnnnnnnnnnnnnnnnnnnnnnnnnnnnnnnnnnnnnnnnnnnnnnnnnnnnnnnnnnnnnnnnnnnnnnnnnnnnnnnnnnnnnnnnnnnnnnnnnnnnnnnnnnnnnnnnnnnnnnnnnnnnnnnnnnnnnnnnnnnnnnnnnnnnnnnnnnnnaatagtcaatactatgattccttgtggctttttctgacatccatatagttattttacctctcttcctccttcttctgtgtctagctccctcccctttctctaagagtcccccatttcccattttgtctttcaggtcatttgtatcctgtcatttcctctcctcccaccttcttctgtatttacattcctcccccttcccaaggaaacccccttccctatttccttgatcagcttactcataccttaatattcccctctttatttcttcccaattccctgaagctggtgatggttccattttactctcctggtttctgactagattcacaggaccaggcatgcaatccctcctatgaagcaggcctcaaatctaaacagaaatgagcttgcaatccctgtaagagtcgtctcactgttacagcagcaggtggggtattatcattgtagaatgcaaggtcaccactgggtaagaccattggtgatctttcttttccagtagcctgtagagaaaacaccattgggcactatgagcgtcagtcaatagggaagaagcttccagctcagttctaaattgtcttctttatattctgcaaccaaagcatgtggtagggtccacagcagggtcttattatctaactctgtgagcaacttggcctgtattgtttgggggtgggggtggggggggatgctctgggaactctctggatatcatctcatagagatgtattccatgcttggcactgggatttgtgcttaataagatatggattctgggagccatcatccttgtagggtaagtctgtataaactcctttaaaattgtattttaaattatcttataaagtagtgggtttgcatgtgtccatttcctgcatccttggttttttattgaccctctccttcattcttttccttctccatccctgtattaacctttccacccacaagctctctgtctactttaatattttctattgtcttacttcccttaaggtcatgccctctctcttttgggacatttctagctttctgatttctacaaatactctgacttagacacataaacagaaagattcaacactaggatccacatgtaaaagtcaaaggtggagtatctgtacatctgagcctggatacctcactctgtataattcgacagctgcaatcgtgtcccctaaaaattgcatcacttcactttcttgttagtggccttgaatgtgcaaatttgatgaagtccaaattaccttcctctctcagtctctctctctgtgatggtttgtatatgctcgattaggatgccgaactctgggcatgaaaaagtacagctgttttcttctaaaagttttataaatatgcatggttttgatatattttgagttaatttttgaaggtataagataaaacacctgttatagttagaatatgaaatgctctccgcagacttacttcctgaaaatgtggccatcaactgttggtgctaaatttagaggggtgggcctaggtggaggtccttgggggctatttcttctgtatggcaccttcctcctcattctctctgcttcatgtgtgttgtgaggtgagtggactctgccacatcttttcattgccatgaagctctgcctcaccatagacccagatgcaacagagccaaggacagggagggagacttctgaaactgtcagtcaaaaagaagctgtctgggcgaggtatgtgtcacaaagtcagagaggtctgactcacacagcaactggtttccagctattctattgactagtgactatttttaaattgtaagatgtcgatacattttgcaaatgctttttctgcaatagttaaaataaacatgcaacctttttcctttatgctactgatacaagtgtatttcttttattgttttggatagcaaacagttcttgtattctctgtgaaattccatggtgtctttcaatgtggctgctagattccatttgctaatctcttgtggatgcatgtatctagattcacaagagatactgtctttgcttataaattccttgtattacaccaagactacccataatatcttgtgaagtatttttctcctttcttttgtgggagagtttaaaaagaatagccattgatttcttctatcttatagaattcatattgaagtaacatgacgttgtgctttctcctttgaagtgtgggtgcacacctgtctctgtgtgtattctatgtacatattagtgtggggttttgtacacacatttgtttgtgtgtgtgtggggtggccaaagatcagctgtcttctccaattgttcttcacctttcttgtttggagacagatcctctctctgaatctggagttcattgactgagttcgcctggctggctaatgaactcagggatctgtctgtctctacgtcctccagtgagcttacagatgcatagtaccatgcttagctcttttacatggatgctagagatgcaagcctaagtcctcatgttggcttcttaagcactttactaactgagctatctccactggctctttggtggtggtggtgggttgatagctgaatttatgttttctcatgagtcaaggttggtagtttctttcaaggactacatcccttttatctaggccactgcatttttgggtgttcaagtgttgaaagacccttctcttgtgaaactttcatttctgattgcattcactataaggggcagtagctagaggactgtttgctaataatctttctcctttctgaattcattattgtgggcaataatgtcctcactttcactctgacttggtaccatgaagcctccttcagttttactctgcctgcctatctgtttaccacttctagggagcacattctggttccgctgtcttcgtggcgtctcccctcttgtccgcccctcattgctttaatttgcattgttttctctcttttgtctttgggttttgtttgcttttcttctattagttgttaaaaattagaaatgtaggtaatttgcggtctctttgtgcttccttgcagaaatctacagctatgaaatgttctaaccacacctctgtggtatccgtgagctttggtagctttgtgtgtttgcatttgaacttgtctgaaaagatttcctaatttttcttatgagtttgccagccattttattttgtttgtgcttttgaccctcttttgtgatttttttttcagtttcgattctgatacggatgtatagctttaattctctgtggtcacagaagataccagtcatgatcttagtcatttaactgccaacgatttgctgtgctgcccaatctgtgatccatgctgcagcggtccctgcatgttgagaggagggactctgctgctctagatagcagtggcttatagaggttggtcaggtccagtcgtttgtggtattggccaattcctctgtttccattttgactttgtgcctaatttttctatccatcactgatattcggttaatgagatcttcaactactgttgtagaattgcctgtctctttaactgggtcagtgtttgttaatatagttctctgttctatatttgtaactatacctttcttcatttttttttaaacatcagacctacttgagtacctaaagctagtctctggaaacaacatgtagttggattcggatttttaaaaaaatatttcctgaaatccattttttaaaataataaaataataaataaacaaacaaataacaacaaacaagtaaataaatgtgttgtttatgtgtatgtgtgtgttgtatatgtgtgatcatgcatgtatgtatgtgtgtatgtatatgcacgtgtatgtgtgtatgtgtgtgtgtgtacacatttctgtatacttatgtgtatgtgtgtctcagaggacaacagagagagttgggtcccttgtagctagttagaggcatgtgaacccccctaagtcagggctcagaattgatcggcgcaaaagtgatttgtgctcttaactgccgggccttctttccaatctcagcaacctctgcctttggagaggaggtttaatctccgtgtacattttaaagtagatattgaggaaatattttctcttttcatgtggccgttggctttgttatatttcacatctttgtttttgttgatccttgggtttccattacaagtttgtttacacttgattatctttctctgtgttgtcaatgccttagcatggggtcatcatggcacagtcacacacacaaatctctgtcctccctctgttctcatttgtccctctttcacacttgcttgtatttctttccttttaaaatctgtttttaaatgttttgaaggttatttaatttttaaaattattttgaactctgaactccctggcaatgtgtgcttctccctaccgtccaactgctctggattcttgagtgaaagacacacacacatgcacacgcatgcacatgcacacgcatgcacatgcacacacatacacatgcacacacatgcacatgcacacacatacaagcagccttattgttaatatgccctaagcagcttggccactccctaactccacgtggctaacacacatcccccctccaatagtccaattgctaaatacttactaaatctgtacttcatctttgctgtcctggaccttgctggacagcctttctaggatctctttccccctgtacctacatgtcggctgtctctccctcctgcacctgtcctgcgtgatccatctcctgcgccctcttcatggcagaatcccctcttcctctttcctcagtcccatcctgggatcctaaaagccccgcctctttctccctgtctaggtattggcagcctgtaactttattgaccagtcaaaaaccaactggggacagacttcctttagacttacatgcaggacactgcaaacaggttttgggtaaacataattagcatgaggacacaagccactacattatttattttattttttatgtttataaatattttgcttgcatatcacacatgtacagtgtctagagaggccagaagagggtgtcagatctcactgggattggggttacagatggttgagttgtcataggggagctgggaatcaaactggagcactctggaagatcactcagtgtttttaaagctgagcctctaaagctgttttgttggcggttattggctaacttggtcttaactactaattacacttgtttatatgaatgtagtcagagctaaaattaactgtatagttatatgctatgctatgttttttcccagcccaacatcaccatttctgctacactacaatcatctttgtgtggtgtatttggtatcatagatacttttattaatattattttatacattttaaatagcattattgataacatttcattgttattttatacatttttctcaataatattaattcattgagactgtgattattagctatgatgttactgtatattacatattattatagttatatcagatacataatatattatacattatgatattattagactgtgatattaactatgggtttagttttttaattagtttttgttcaattcttaattttctcttcatttttgaaggaaaatcttatgagctatggaattctccatttctagattttttcccttttcatggtttctaaaggggacctcatgtcattgtctcattaaagtcctttgtatagctgtttaaaattcttcatcttagtttatggcggttgggcttaaatgtgtctcggtgtgcacagctgtgagtttaccctacttccatgtccctgagtctcctaccgtggagacttgagttttccattacagttgagtagttctgaccattattttttccgtttttttctgtccatttttctctctcctctcactctggaattccccttatgggcatgttggtgtgtttggctgtaatacacagatctctgatctgttcatttttgtttgctgttttgtctctgtgcatcttggtctggcttgatttcagctgtcctgtcttcaaggtcaccaattttctttcccacactctcaactctgcccttaaaattctttggtaagttttttggttttgtttttgttcttttgtttttttgtttttgttttgttttgttttctttgcatatttactattgttgcctctatccagcatttctatttgatctcattgtataacttttttgaggtaagttcttacactggcctcactcacaacccacaatcctgcttcagcctctgagtgctgggattgtagctgcgcattgccacaccccgctccaatttgttatgatttctatgtcatcaatgacgatttttactctggattcccattcccattgcctttgcgttctgtcctactttcctttaatcctttaaatatatgtaagacagttgatttaaccccattgtctcctaagtccagtatttgtcctttctcttgcccagttttctcttatctcttcccacgagttggctgtactttcttcttaacatacttatacttttgaattgaaaagtagatactctgaatattattaggatgtaatagctgcaggagacgtgttctctttgtggacctgctgtcattgcttggcatgggtggtaatgtttagatggttagcagctttatagaaatatgtttgtgtttatttggtgtgtgtagtcactgagactttaagtacctggagtcaaaagaaagggaaagagtctggtttttgctctggctctgtgtgctggcgtgccttcagggcttacccaggcctttgaagctctgcaaagcttgacttcctgcctgtaaggctcttgagattcggtcagagctgagaattcaggaattccttacatcaccccaccctgtacccgtccctcaccagccctgcacctctggcatatgcctgacattcatgcacagccttttaaattccttggtgtaggtgggtgtctttccaaaccactgttcttggaagtattacaaccctaatccccaaatcccagggtttaggaaagacattttggttgttggcttggtttttaatgtctttgagattggtcactgtagagttgcttctgtgagtgttctgaggtatagatgtaacagcaagcagggaacacacacacacacacacacacacacacacacgcactcatgacaaaattttttgagaaaaggtccttctgctgtttacagctccatgaacctacatcagagaggaaggccactgccatggggaaaggagaccacagcagtgaccacagcagtgatactgcacagcccacctctccctcctctttgatggtgtgggtggtcttctgttccaaggaactacagaagactctaacaactcctgccactaggaactaatagtttggatgagaacacatgttcccttggtgttttttgtccatgttggatgctggaggttgaaactataaccttatacttgctaaggaaacactttactactgagctaactcttcaactcatggatgggaatacattcctgaatactaagtagtcatccgtgaaacctacaacctttaggaaacagtgtgactgtggcctttgggaagctttggtttgttttggtcgctctaggttggttgtggttgggtaggaaacagataagatgatctgtcttacttcctcctggtgtaacgcaatgcctgatgtaacaatttgagaggaggaggttttattttggctcacagtttcaaacgaatctctggccaccatagggagaaggcacagcagagtggctccatctcaaggtgggagcttctggcagtgacttgttctatctgtatgaaccaggaagcaaagtctggaattagaaaagagtgtcatcaaaggcccgtcagccagtcccaacaacctaaaggctgacaaactacaaaacagtgtcacaatctagctttctaaccataagctcgcaagggacagttcagattccaactgtcatacttattagacaaagatgattgtgtaaatactggagtgatggagtgcccttcgtgtggggcacttttgttcctgagacagagtagacatggaacaagaggcatcccaatttagtgggtaaaagtatggaagctgggtgaatttcctggaatttcttgttgttgggacctaggtaagatattaaggaatgttatatcctaggtaaaatgttaggacctaggtaacagttacctggccagcctgccattatagggcaactttctcatatgtttttgctattactaggagcctttctagggctaagattgattacatattctctgatgctgtgtacccttgaaaagcaatcaagatagaagcttggaccagaactagccattcaatggcactccctgcacttatgtatttgcttttgtgatataagctgcaccatgggatagaccctaacataagagaaatacctactctaatataagaaactatttggaataagacttctattttgagtagtgtcgagtaaagttgaagttcctaagacctccctgggaactaacatcctacttgactgaaagaaacatgtacgtgggtaactgacatccttgttgacatgttatggcatgaatgttggataagtcccatcctggtagtcaggttaaggtatgaatattagacaaggcaagtcccctgtcacagataagtacaccaaccaatggaaaaatgtgcaacaaaaacatgtttctaagaaatcccctatccctgaatcctgattagtgaaataacttgacacagatgtttgtagatttggggcttaaaaaccctgtaggattttagcttgaggtcatggttcagttctcaaatcctgaccatggtcctggccaaccattcctgggaggtgtgctcaataaactatccctatctgactgagatcagtgtttgtgtggtttatgaggcaactcctggaccccaacgtcatcttgactttggccagagtgtttttattcccattgctgggctcatagcccctgcctcacatgggttgctgtgagcagaagagaagatgtacaactaatgcttggagcacagcaaaagctaaatgtatggatggtacaaatagcctcctggtcatccaggttactgtgcaggacctgtgtgggaagaggtgggttttcaagtgggtctgtactgacgattgaagtaggcagctggcttctgcactggccttccgtagcccatctgggtttcatacatgtgagatagactcaagacagaggcagcaatatgaaagaatgatcaaggtacctaagggtctccctgactgtctccatgttccatttcacagctatctacaacttccaaggcagtgaagcccagcatctcacgctacagattggcgatgtggtacgaatacaggagacctgtggaggtgagtcagtattgcttatgtgcccctcagatgttggacccttaactctaagaaaccatggcacctgcggtactctccctaaatacaaacttgagtgtcacatgagtacagtcagccctttgtgcccgtgggatctatgtccatggaggttcaaccaactgaagacaggcaatattacatctggaatatgtatattcagtttctgtcattacttcataagcaatacaacactattattattttttattgattattgtattgatttacacttcaactcttatcccccttcccagtatcccctctcacctctcattctatacccccttacctttgcctctaagaggctactccctcacccacccactcactcccacctcacccctgtagcatccctcttcgctggaggcaacaagcctccacaggactgaggatctcctcttccactgatgccagataaagcaatcctcttctacaaatgtagcgggagccatggacccatgtatactctttggttggtggtttagtccctgggagctctggggggtccggttaattgatgctgtcgttctttctatggggttgtagtgcctttcagcttcttcagtccttccctaactcttccattgggattcctgggcttagttcaatggttggctatcagtgtctacatctgtcttagtcaggtgctggcagagaatctcagaggacagccatattaggctccggtctgcaagcacttcttggtatcagttatagtgtcagggtttagtgtctggggatgagattgatcccaaggtggggatggggtgtctctgatgacctttccttagataggaactattcagggttaaaatatttgagatgattgagtggactcattcctcaattggtggccttgtctatctactgcaggtggtctcttcaggttctatctcagcctctgttgggtatttcagctaatgtcatccccattgggtcctgggagcctcttgtatccctggcatctggggatttctagtggtttcccctaccccaccccattcctcacccccatttctacatatttctatttattctcctggccttctggacttcttcccatacctgaacctattccccttcttccctcccccctccactttctcacccaagaccccccctcccataattattttgtttccccttctaagtgtgattaaagcatccatattttggccttccttattgttaagcttcatatggtctgtcagttgtatagtgggtattctgagcttttgggctaatatccccttatcagtgagtacataccatgtatgtccttttgggtctggattatctcactcaggatgatattttctagttccactcatttgcctgtcaaaatcatgaagtcgtcattttcaatagctgagtagtaatctattgtgtaaatgtaccacattttctgtatccattcttctgttgagggacatttgggttgtttccagcttctggctactataaataaggctgctatgaacatgagtagagcacgtgtccttgttatatgttgaagtatcttttggatatatgcccagtagtgatatagctgggttttcaggtagaaatatttccaattttttaaggaaccaccagattgatttccaaagtggttgtaccagcttgcaatcccaccagcactgaaggagtgttcctctttctccacactctcaacagcatctgctgtcacctgagtttttgatcttagctattctgattggtgtaaggtgtaatctcagggatgttttgattagcatttccctaatgactaaggatgttggacactttagatgcttctcgaccatttgagattccccagttgagagttctttgtttggctctgtaccccatttttaaaattgggttatttggttttttggaggtgagattcttgagttctctatattttttggatattagccctctaccggatgtggggttggtgaagcaatctgtgagttgctcatttgtcctgttgactgtgtcttttgccttacagaagcttttcagtttcatgagatcccatttataacttgttgatcttagaatctgagccattcaagttctatatagcaaatcttcccccgtgtcaatcagttctaggctctttcccactttctcttcaattcggtatatgtggttttattttgagatccttgatccacttggacttgagcattgtacaaggggataaatatggttctatcttcatttttctacatacagactgccagttggaccagaaccacttattgaagatgctttcttttttccattttatgtttttgggttctttcttgaagatcaactgtctataagtgtgtgagcttatttctggttcttcaattctattccattggtcaaccgatctacctctgtaccaataccatgcagtttttgacactattgctctgcagaagtagggatggtgatgcccccagatgtttttttattgttaagaattattttagctctcctgggttttttgttttccatatgaaattgagaactgctctttccatgtctatgaagaactgtgttggaatcttgatggggattgcattgaacctgtagattgcttctggtaggatggccatttttactatgttaatcctatcaatccactagcataggatatctttccatcttctgaggtcttcttcaatttcttttttcagggatttgaagttcttatcatacagatctttcacttgcttggtaagagttacaccaagatatttaaaactatttgtggctattgtgaaaggtgttgtttccctaatttctttctcagcctgtctattatttgtataagggaaggctattgattagtttgagttaattttatatccagccaatttttcttttttttaattaggtattatctttcttcatttacatttccaatgctatcccaaaagtcaccataccctccccccccccactcccctacccacccactcccacttcttggccctggcattcccctgtactgaggcatataaagtttgcaagaccaatgggcctctctttccaatgatggccgactaggctatcttctgatacatatgcagctagaaacacgagctctgggggggggggtactggttagttcatattgttgttccacctatagggttgcagactcctttagctccttgggtactttctctggctgctccattgggggccctatgatccatccaatagctgactgtgagcatccacttctctgtttgctaggccccagcatagcctcacaagagaccgctaaatctgggtcctttcagcaaaatcttgctagtgtatgtaatggtgtcagcgtttggaggctgattatgggatggatccccaggtatggcagtctctagatggtccattctttcgtctcagctccaaactttgtctctgtaactccttccatggatgttttgttcccaattctaagaaggggcaaagtgttcacattttgttctttgttcttcttgagtttcatgtgttttgcagattgtatcttgtatcttgtgtattctaagtttctgggctaatatccacttatcagtgagtatatatcatgtgagttcatttgtgattgggttacctcactcagggtgatcccttccaggtccatccatttgcctaggaatttcataaattcattctttttaatagctgaatagtactccattgtgtaaactaccacattttctgtatccattcctctgctgagggacatctgggttctttccagcttctggctattataaataaggctgctatgaacatagtggagcatgtgtccttcttaccagttggaacatcttctggatatatgcccaggagaggtattgccggatcctctggtagtactatgtccaattttctgaggaaatgccagactgatttccagagtggttgtacaagcttgcaatcccaccaacaatggaggagtgttcctctttctccacatcctcgccagcatttgcagttacctgagtttttgatcttagccattctgactggtgtgaggtggaatctcagggttgctttgatttgcattttcctgatgattaagtatgctgaacatttttcaggtgcttctctgccattcggtattgctcaggtgagaattctttgtttagctctgagctccattttttaatggggttatttgattttctggagtccaccttcttgagttctttatatatattggatattagtcccatatctgagttaggataggtaaagatcctttcccaatctgttggtggcctttttgtcttattgacagtgtcttttgccttacagaagctttgcaattttatgaggtcccatttgtcgattctcgatcttacagcacaagccattgctattctataagagattttccccctgtgcccatatcttcgaggctttcccccactttctcctctataagtttcactgtctctggttttatatgcagatccttgatccacttagatttgaccttagtacaaggagataggaatggatcaattcgcattcttctacagttgtgccagcaccatttgttgaaaatgctgtcttttttccactggatggttttagctcccttgtcaaagaccaagtgactataggtgtgtgggttcatttctgggtcttcgattctattgcattggtctatttgtctgtcactataccagtaccatgcagtttttatcacaattgctctgtagtacagctttaggtcaggcatggtgattcccccagaggttcttttatcattgagaagagtttttgctatcctaggttttttgttattccagatgaattggcagattgccctttctaattcgttgaagaattgagttggaattttgatggggattgcattgaatctgtagattgcttttggcaagatagccatttttactatattgatcctgccaatccatgagcatgggagatctttccatcttctgaggtcttctttaatttctttcttcagagacttgaagttcttgtcatacaggtctttcacttccttagttagagtcacaccaaggtattttatattatttgtgactattgtgaagggtgttgtttccctaattcctttctcagcctgtttatcctttgtgtagagaaaggccattgacctgtttgagttaattttatatccagctacttcaccgaagctgtttatcaggtttaggagttctctggtggaatttttagggtcacttatatatactatcatctgcaaaaagtgctattttgacttcttcctttccaatttgtatccccttgatgtccttttgttgtctaattgctctggctaggacttcaaatactatgttgaataggtatggagaaagtgggcagccttgtctagtccctgattttagtgagattgcttccagcttctcaccatttactttaattttggctaccagtttgctgtagattgcttttattatgtttatgtatgggcctcgaattcctgatctttccaagacttttatcatgaatgggtgttggattttgtcaaatgctttctccacatctaaggagatgatcatgtggattttgtctttgagtttgtttatattgtggattacattgatggatttccgtatattaaaccatccctgcatcccaggagtgaaacctacttggtcaggatggatgattgttttgatgtgttcttggattcagttagcaagaattttattgagtatttttgcattgatattcataagggaaattggtctgaagttctctgtctttgttggatctttgtgtggtttaggtagcagagtaattgtagcttcatagaatgaattgggtagagtaccttctgcttctattttgtggaatagtttgtgaagaactggaattagatcttctttgaaggtctggtagaactctgcactaaacccatctggtcctgggctttttttgattgggagactattaatgactgcttctatttctttaggggatataggactgtttagatcattaacctgatcttgatttaagtttggtacctggtatctgtctagaaacttgtccatttcatccaggttttccagttttgttgagtatagccttttgtagaaggatctgattggtttttggatttcttcaggatctgttgttatgtctcccttttcatttctgattttgctaattaggatgctgtccctgtgccctctagtgagtctggctaagggtttatctatcttgttgatttcctaaaagaaccagctactcatttggttgattctttgaatagttcttcttgtttccacttggttgttttcgcccctgagtttaattactacctgctgtctactccttttgggtgaatttgcttctttttgtcctagagcttttaggtgtgttgtcaagctgctagtgtgtgctctctctagtttctttttggagacactcatagctatgagttttcctcttagaaatgcttttattgtgtcccctatgtttgggtatgttgtggcttcatgttcattaaactctaaaaagtctttaatttctttttttattctttccttgaccaaagtatcattgagaagagtgctgtacagtttccacgtgaatgttggctttctattatttatgttgttattgaagatcagccttagcccatggttatctgataggatgcatgggacaatttcaaaatttttgtatctgctgaggcctgtttggtgaccaagtatatggtcaattttggagaaggtaccatgaggtgctgagaagaaggtatatccttttttttttttttaaggataaaatgttctgtagatatctgctagatccatttgtttcataacttttgttagtttcactgtgtccctgtttagtttctgtttccatgatctgtccattgatgaaagtggtgtgttgaaatctcccactattattgtgtgaggtgcaatgtgtgctttgaactttactaaagtctctttaatgaatgtggctgcccttgcatttggagcatagatattcagaattgagatttcctcttggaagattttacctttaatgagtatgaagtttccctccttgtcttttttgataacattgggttggaagtcaattttattaggtattagaatggctactccagcttgtttcttcagaccttttgcttggaaaattgttttccagcctttcattctgaggtagtatctgtctttttccctgaggtgggtttcctgtaagcagcaaaatgttgggtcctgtttgtgtaggcagtctgttagtctatgtctttttattgggaaattgagtccattgatattaagagatattaaggaaaagtaattgttgcttcctattatttttattgttagagttggcattctgttcttgtggctgtcttcttttaggtttgttgaaggattactttcttcctttttctatggtgtggtttctatcttgtattggtttttttctgttattatactttgaagggctggattcgtggaaagataatgtgtgaatttggttttgtcgtggaatactttggtttctccatcttaggtaattgaaagtttggctgggcatagtagcctgggctggcatttgtgttctcttagtgtctgtataacatctgtccaggatcttctggctttcatagtctctggtgaaaagtctggtgttattctgatagacctgcctttatatgttacttgtcccttttcccttactgctgttaatattctatctttatttagtgcatttgttgttctgattattatgtgcctggaggaatttcttttctggtccagtctatttggagttctgtaggcttcttgtatgttcatgggcatctctttctttaggttggggaagttttcttctataattttgttgaagatacttgctggccctttaagttaaacatcttcattctcatctactcctattatctgtatgtttggtcttctcattgtgtcctggatttcctggatgttttgagttaggatctttttgcattttgtattttctttgattgttgtgccaatgttctctatggaatcttctgcacctgagattctctcttccatcttttgtattttgttgctgatgctcacatctatggttccagatttctttcctagggtttctatctccaccgttgcctcactttgggttttctttattgtgtctacttccctttttaggtctagtattgtcttgttcatttccatcacctgtttggatgtgttttcctgtttttctttaagaacttctacctgtttggttgtgttttcctgtttttctttaaggacttgtaactctttagcagagttctcctatatttctttaagtgagttattaaagtccttcttgatgtcctctaccatcgtcatgagatatgtttttaaatccgcgtctagcttttcgggtgtgttggggtgcccaggactgggcggggtcagagtgctgtgttctgatgatggtgagtggtcttggtttctgttagtaagattcttacatttgcctttcgccatctggtaatctctggagttagttgttatagttgtctctggttagagattgttcctcttgtgattctgttagcctctatcagcagacctgggagactagctctttcctctgagtttcaggtgtcagagcactctctgcaggcaagctctcctcttacagggaaggtgcacagatatctggcattcagacctgcctcctggcagaagatgaaggcccaaaacagcacctgtcccagaagctgtatcgcttcggcctgttacagaagttgttagcttctgtagtccacactctcacctgcgcagactagtctcagagggatcagtgaaccaagatggttccccctggtgctccatcaacgccctcccgggcagggcagacacctctcctctggcagggaaggtgcccggatgtctggagcctgaaatggggtctgcctcagaagctgtcctctagggaccttgggtccaactctgtgcccaggtgacccggtgctggcgctaatcagaagggatttggaccatggtcaggctgagttttctgctatcctagtgctgtctcaggtcccatgcaattggattggaacagaagttttgttccactcactggtggtcctaagatcgcatggagagtcctctaggagaccttgggggtatctgctgacttcgtgcccaaggtgacctggtgctggtgccaactggaagcgacttgtgaccctggtcagctccagccatttttctgaagttgtttattagctataaaagttctcttgtatattttttgaggtctcttatatatactagcatatcacctataaatagtgataccttgacttcttattctccaatttgtatcccctttatctccttttgttgtcttattgctctagctagaacttctagtaccatcttgaatagatatgaagagagtgagcagccttgtcttgtccctgatcttggtggaattgcttcaagtatttcttcatttaatttagtattggctgatggtttgctgtatattacttttattatgtttagttaagttccttaaattcctgatctctctaatacttttatcatgaagggatattgtatttttgtcaaatgttttttcagcatctaatgagatgatcatatgctttttttctttcagtttatttatatagtgagttacattaataactttcatatattgaaccatccctgaatccctgggatgaagcctacttgattgtggtgaatgatggttttgatgtgtccttggattcggtttgccaaaatattattgagtatttttcatcaatattcactaataaaatttgggtctttatgtggtttaggtatcagaataacaatggatttgtagaattaattaggtagtgttccttctgtttcttttgtatggaatagttatagttagctcttctttggaggtctgctagaattctgcactaaagccatttggccctggatttttttggttgggaggtttttttttttttttttttaaatgatttcttctatttccttaggggatatgagacggtttagatagtttacctgctcttgatttaactttggtacatggtatctgtctaaaacatcatccatttcatctagattttccagttttgttgagtaaaggcttttgtagtatgatcagatttttttttttttaatttcctcagtttctgttgttatgtttcccttttcattcttgattttgttaatttggatactgtctctgtgtcctttagttagtttggctaagggttcatctatcttgttgatttttctaaaaaaaaaaaaaaaaacaaaaaaaaaaaaacagcttttggttttcttgattttttttgtatcattctctttgtttctaattggttggtttccacactgagtttgattattttctgccttctactcctcttggatgtgtttacttctttttgttctagggttttcaggtatgctattaatttgctagtgtaggatctctccaatttctttctgaggacacttagtgttatgaattttcttcttagcactgcttttattatgtccaataaatttgggtatgttgtgtcttcattttcattgaattctaaaaagtctttaattttttttatttcctccctcccacattaccatttagtagagagttgttcagtttccatggatatgtggactttttgttgtttttgttgttattaacgtcaagccttagtccatggtgatttggtaggatgcatggaattatttcagtcttcttgtatctgttgaggcccgttttgtgattgattatatgatcagttttggagaagttactgtgaaaggctaagaagaagatatattctttgttttgaggtgaaattttctgtatatatctgttaaatccatttggttcataacttctattagctttattctgtctctgtttaattactgtttcaatgacctgtccattgttgtgagattggggtgttgaagtctcccactattattgtgtgaggttaaatgtgtgttttgagctttagtaaagtttcttttataaatgtgggtgctcttgcatttggggtgtagatgttcagaattgagatttcatcttggtggttgtttcctttgatgaatatgaggtgtctttccccatcccatttgataacttttggttgaatgtctattttattggctattagaatggcaactgctgcttgtttcttggaagtatttgcttggaaaatcttttcccagccttttactctgaggtagtgaggtagtcaatcttagttgtttaggtgtgtttcttgaaggcagcaaaatgctggatcctggttgcatatccagtctgttagcttatgtctttttattggagagtctgagagatattaaagatttactattgggtgttcctgttatgtttgttttttttttttttttttttttttttttttggttttgtttttgtttttttctctttgatgtagaaactctcctgtgttggagttttctttctagaatcctctgttgggctgaattaatagatatgtattgtttaaattttgttttgttatggaatattttagtttttccatttatggtgtttgagagttttgttgagtatagtcacttgggctggcatttgtgttctcttagggtctgcatgacatttgtccaggatcttctggcttttagagttttagttgagaagtctggtgtaattctgataggtctgtctttatatgccacttggcctttttctgttaaagttttaaatattctttatttgttctgtgcatttagtgttttaattattatgtgatagaagaattttcctttctgatccaatctatttggtgttctgtaggtttcttgtacttttatggccatctctttctttaggttggggaagttttcttctatgattttgatgacagtgttctctggctccttgagctggaaaagttcactgtcttttattcttattattcttatgtttggtcttttcactgtcctggatttcctggatgctttgaattaagaggttgtttgtttggttggtttgtgttttctttgaccattgtatcagtatcttctatggtatcttctatgccagagattctctcttgtatcccttgtattcttttggtgatgcttgaatctgtagttcttaacctctttcctaggttttccatttccagggttgcctctatttgtgattgcttactgtttctacttctatttttaggtcttgtgtcactttgttcaattccttcacctgcttggttgtgttttcttgtatttctttgagggatttatttgtttcctctttaagggcttctacctgtttaactgtggtttcctgtatttctttaagtgagttgtggatatcttccttaaaggtctctattatcttcatgaaatggtattttaggtcagcatcatgcttttcaggtgtattgggatgcccatggcttgctttggtgggagagctggattctgatggtgtcaaagtatattggcttctgttatttatgatcttaagcttgcctctcaccatctgtttttctctgctgttagctggccagggtgtctgtctggagcctgcctcctgtgtccctgggttgcagcaaatgtcctgggggatctgtggccctagctgtagccgatcttctgggagacttgcagactcttaccctggctgcaacagatctcctggaagccctgcagactgtgtggtgttgagagatagggggagacaggctgatctgcccccaagcaggtggaaggacaacactattattatttatatgacattgtcatacattagggattgggaatagcatagatatgatttaaaatatgtgaggctttccatatgatctatatagacatgacaccattttatataagaggcttgagcatctgtgagctttggtgtctgtaggcaatcctggagtcaatctctccaggattctgaggaatgactgtaattagagtttactgaacaaaaaaacaagtgctttattattttaggaatgttagtttcataacaaaggcctaactggctgatttgatgtttgctgtgttctgcgtttgctacagtcaggggaccaaggggctttgggcctgtggatctttctagatgtagttttttattaatctgtacaccattgtaaagaaaaataagcatcatcaagattcaggagggtgctgtaaattatcctcctgactgtgagagcaaggctatgctgcacagtagcgttacataatctcagctcccagcggaacagggtctcaagccaggactgtgcactggataaagtggcagctcttccatcccacaaagccactcagtcatgaagctaaccgtatgttgagttaggtccacccatgatggtggtaatggtgatgagagggggacttcttaatatgttctcaaagattaatagctgtaaacgcatgagacaggcaaatgaaaatgaacatcatctatgttatacttgatattaggggcagctttaatgtataatgacctaatgagtttgttaatgtataactgatgatcagcagactctatcatcccgcatagcccagagttctctcctgccaggtcagcctatgactcctcctataaaggacacagagtatgtttcctgtgactggcagaactaaggagaaagaggagattggctttagaatacaggccctgtgctatctcccagagaatccatcagatgaggccctggaaaggagtgcagagagataggagacaggtgtgctctggggtaggcatttcctgggacacagcagccaagaaccatcttgtcctttccacagaccagacaccagagagcacagatgcctacttagtcctcacatcaggccactggataggtagagtcctttgcattgctgcataagctacaggaggctttctgggaagtggagccctacctttctctccagatttgtgcagaggtgcttgtgcatgtatgaaacacacacacacacacacacacacacacacacacacacacacacatacacacacacatacacacacacacacacacacacgacattaatacaaacactaataacttcctaacaaagacacacatatgaatgaatacacagctattcataaacagagcctccacacaaagacacacaaatttgtatatggacaggaagacatacaaacagatgcaaaccaagagaataagagaatgaaaaccctgtctttaaggaaggaaatttagtatttcaaagcaacgtttaaaggagtccctaaagaggagcaagacctgctggaatgtgttgtgtgctttggcaggattcttttctgggttgcatctcatcatgcactgttcagtgcccagggtgccaaggtccatccttggcctttgaagctttttgaagacagagaggatgggcttgattcagggagtgggtgggtgagggaatgccttcctatagtgtctggcctgttattctaagtttaccacccctccccacagtacagccctgtgttttacacgtctaattctagccctttttgatttgtaatcttctcatcagttttagttatttattacaacatatctatttacaacaggaataaatgtttttaaatcatcctaagaggttaacaatgcttaactttgggtggttggaacttgagtgatgataactttgaattttgtgtgttctattgtttttgtcctattgttctattggttcctcacctgaagagttaggatcacacagctcctggacctgttatctgatagaaaggggagaagagagaagtagtgttgcatcatgcttgactcaagagcaaccttttgtgttctttcccctcagccaatagagcttggagaagaccagtatgtgtacatatctatggactatggttcctggtcatgtggaaactgaatttttagtgtctagaacggatgagattagcccttctttgttccacatgatgttttaaataggatttgtctgctttgaattcacatgagggtccactctctgaagtattatgctgatggtattttgagggaggaaacatgatgtatacaggtacggcctttggcaagtaaagtcattagggtggaagctctatgagtgaattctggaagctttatggagagggagaaagaccacacagatatagcgggatgtagaggctgatgtaatgttccaaggggacactcaccagaggctgcaatgtgctctgggaccttgaatctctagaatcatgagccataaatagctgtgtctaagtactctaagtatgaatggtacaaacacaattctaactgggggatttaaatatgagtgggttttagtatgaagataacatgttataatacaaactcatatagttcagaagggttgacatctctctgactatttagtgacatccaaagattccaggctcatgaccagcatgctttgcacctcccccccccctttcccccttaaatatcggtagtttagagtattctctattatctgtcttccttactcagttgagcactaagatgaatgaactcatggcccggtagctatgtagctggagactaaggtaccagatgtctgtgacatacccatataacgatgcttctgacaggcaccccactgtgcttaagtatactaggacagcaattacccaccttcaaaaatatcaagatgcctctgtctctactgtcttttttttttttttttttgaggcagtctcactatatacttctagctggcttggaactggttttatagaccaaggtggccctgaactcatagatcacagagatctgcctgccccttctaagtactgggattgaagacctgggccactgttaattccaaaaatgtgaggaaaaaagacactgacccaaatcatcatggtcaaattaattaaagcaagccttttaaaattcatgtacatgggctgcctcccgcaatggtgaggctcgagaggtcagcgttggatgtgaggaagacaagggttttatagttcaggagtatgtaatgggcatttggtgggcaaaataggcagggttgcagaagcagaacataagcataacaagttagttatgacacaaagaggtagttgcaagatgggcaaaacaaggtagtcatagcaacaagcaatcatataaccttttgaaacaaagatagggttgtaagatggttataagcaacagacatggttgttgtttcttggaacaggcagtatagaatcatttatagttacctgtggggtatagcccaatctttgagaagcagaagtttaaccataaacaggaatgaacctggtctgtctatattataaaatggtttttttgcttaaggaggaggcaggttggttcttcaccacaatgccttgctgtcccctagaccacagtggagggtgttcttctgaggtagctggtctttagaatcttcttcgtaaggtgttctcggagttgtatgtggacactatacttactcattccctgcccggcttggaatgacaaaaaagtctgtttacggatacttgtgtatgtcagggctgtggggtctattatagtagtaaggggggggggggctctagacagagactccagaaaatttttggacttgtttccagtaaaatatgaccgtggggaggggcaaggaaagaggctactgggagatttgagttgttataaagcaatgtaatacttcactgttttctacagagagtatctcatgacagggttctgagagccagccttcttgcccgccaacatctgcagctcttcagagctgtcagatgcccttgcctgcaggactgtgtgggccacaaagagctctgggtaggtggtgaaggattgaatctaccatgggtagagtggggcacaccagaatctacagcaccttctgtactagcaaccctgtcaagggtgattgtgacccaaacaatggggacattgtgagctcttcacaggggatcatttgaagaaccactctgccaggaggcctcctttgttcagctgtgtgcgagaagctgctgggtgtgaaagggattctattgtttggaggatgctgctccactctctgaaagttgaaacccacttttcctgtttttttgaatgagggtggggctgagatgtcagtgagcttgagttctgtctcatttattctgttgttatggaaatatgttgaaaggacatcaataaaaagaatgagattctaagtctgtaggttctggaaacaaaatagaaaacatttctaacttgttggattatgatattaatttaactattgtccaaaaaaggacatggtacccactaaccttttgaatattttccgtatggcaggcacagggaaatagatccctctgaacacttcacacaatttaaatttgacaaggcagctgtgattattcctattcaacatgtcacttgtcaacgatcactcagataggaggactcagatcttcattctaagccaagttttgactacacactcatttttaaatacatacattttattatctatagtggaggtatacaacataatggtatccttcgtccctccctccctccctcccttccttttttcttccttctcctgctccttttagattttatttcttttatatatgtgggtaaaacatctctctcttcagacacaccagaagagggcatcaataccattgcagatggttgtgaggtaccatgtggttgctgggaattgaactcaggacttctggaagagcagtcagtgttcttaaccactgagccacctctccagccccttgttattgttttcttaactggagtctgtctgctgcgcgtgtccttcttgacttcttcagtttgcatatctactgctttgtatcttctgacctatgtctcgaatttcctgaatatattcctgaatataacctgttcatattgtattttttgtgtgtatgtttcctggaccggtcctttggcactgcccagttggtgtgctcttctctgggaagaccagccctcctactcccagcattcctcagttgcctgcatgtctttgtgttagatggtggcctctgtggcttgttcttgtctacttaggtgtgtccattggtttcatccttgttcggctcacattcgggctgtcatgatggtgttatggagttaacttctgatgttactaggagacaccatctcagagcaaactccctgaccctctggttctttattgttattagatgtcacacgcagatgagatcatagagtattttttttctgctatgtgcttattaaaggcatgcaccaccacgctcagctgagtagtgttctgcttgtatagtgcacttgatacacctctgcttctttgttcactcactgatgggtgcttcctggtgcacgactttaatcccagcactcgggaagcagagacaggcagatttctgagttcgaggccagcctggtctacagagtgagttctaggacagccagggctacacagagaaaccctgtctcgaaaaaacaaacaacaacaacaaaaacccaaccaaccaaccaaacaaacaaaccttaacttttatgaacagagctgcagactattatgaacatgggagcacagacatcttaaagaactggtgatgtcatttcctttgggtagatgtctaggagggagcttgttggccatgtggaagttctatttttaaagattttagtaaccattagcctttttttttttccatagcagttgtactcatagagatgagtaacaacggtatacttcctaccaacagtatacttagtttgtttccttgttaacactcatttattacctcttgactttttgaacgtatccttatcagtaaacacgggcagtgtcttgtggtttggatttgcagtaccctgatgactaataatgcccagggacttctcatattctcgttagcagttttctatattttctgtaaaaatggtccatgttttaaatggattgcttgcttttgtactactgggtcagatgattccttcattatttttagtattttccccttattagacaaatagtttgcaattttttttcagtctccaagttgccatctgatttcgttcattacttcctttacttcataggaggcttttaatcagagcccatactcttaacctctgatcaaataattcctatttgatcttgatattattagatattattgattattattattacagaggaaagtaaaagtactttcaggtactcatcacttagataaatagtaacattcttgcttcatatattccttaaaaatactcagatgtaagttgggcagtggtggtagccatgcctttaatcccagcacttgggaggcagaggcagggggatctggagttcaaggccagcctggtctacaaagtgagttcaggaacagccaaggctacaacgagaaatcctgtctcaaaaaagaaaaagaaaaacaaaaacaaaaacaaaaaaaaccctaaaactcccaaactccccaacccctcaggtgtgaccgagatcccagctgattgtccccatgttcctgtctttccattttgcccacaagcaagccatggttatcttgaaattggaatgttttcttcctgttcaatgtttcgtatctttattaaatgcatttctttataatcgcgttatttatttatttggaattatgtgtatgtgtgtctctggatgggtatgtgtagttgagttcaggcgcccacagaatccagagatctcagctcctctggagccagagttttagggtgttgtgaaccacttaatacgggtgttaggaaccgaactcaggtctcctgtaagagcaatgggtgctgttcactgtataactatttcctcagcctctgtaatgatgttttaaaaatagttcttgtgacaatcctctgaggaaaggtgctacttttatcagataagaacattgaggcttatgacatgaccaagttctgcctaaaaatggcagacagagggtgctttttcttggttctaggagattttgaatctttcctctctcccttttgtgtatttttgggttacatgtgtgctgtaggaagggagtacaactgaacagctgccatttcacagttgtctggaagacttggaagaaattttactttgctcattttccctcggggcacgggacttagcatccaggctgctgtagagaatgccatagagttcacatgctaagtggcagagatggaattctgtggtagagtagggaaatccaagatcaaggtgttggcagatgtggtgtcaggtaagggctgggttctcctctgcacatggctttcttctgcctccgcatctaatggtagaggagttttcagagttcgggctctgaaccgatagacttggactaaagctgtacttgtgcaatcttggctcagtacacaactgacttatgtttcaaggccatcaatgaaatgggaataagactacttagctcactttgctgtgagtgtgacaagagagaacagatgcgtatgattaaagtgactgtggctgggaggtagtcacaataaaggtcgtgtgccacagtgagtatagtagaattcaagagtcaactacttaggtttgaatttcaagctgtgtgacaaccagcaagttgccccttctctgtgcctctctgttttcatttacagaactgaagtagtaacaggattgtcataaagtttagtctttaatttggtaggtgaagctcgataaatttatagtttgaaaaaaaaaaaacccaaaagcaatgccattagcaaagtgtctagggtacagaagatatgtggaaggattaaaccatcttgtccactgttaattgtcttccatcagaattggcaaatacttagaggcaagtaagagtagaaggtggctcttcttagaaggtgaactagaagagcttccatcccagaagtcctcagttacaaagtagcttggaaatttactctgggagtctctgatgataagatgatgaacttttagatgtgaggattagttttgccaacatggctcaatctagagccatctgggaagggagtctcaatggagagctgcgacattgattaccctgtgggcatatctatggggttgttttaattaagttagttgatgctgggagacacagtccagtgtgggcaggaacattcccaaggcaggaaatgttgaactgtgtaagactggagaaatggagctgagcctatacacgcaagaagcacgcatgtgttcacttctctgcctttggctgtggctatggctatgatgtgactagttttaactttctacactttgacttcctctggaattgtgaaccagaatacccccaccccagactgctttttgctcaaggtgtttctatcacaacagaaatggagctagcacattgcatgaccaccaaactccttcccctaacatcagaagtggggctgttccttctacatccaaacatgtcactagttgagtgactgagaaaattgctcaatatctctctgtcttgggtaggctactcagctgtacaatggaataatgatgatttctgctccatatggttgtcaagaagatgaaaaggcttaatgcagaatagctcctggaaggatgctttcattccaaactccggatccttcctccccaacttccctaatttcccttctgttttctctgtgtcttttctcttctttctcactttttgtcactcaaaataagatcttcagggattactgcagcttcaaaacttcctttaggcattgaccttcaagctggtcatgattggaagggtgactttgcagttcagttatgaggcgggggtcgggagggggaaggacttgtgtggatatctgctgagaatatattctggcaacaatctgtcagcttgataatgagggtctgttaatgagacacttggcaggtgcttttatttacaaagatgacaaatgctaccacgtggctgtgctccaatcatttcaaaggccagtggactcatttcagcctctgaacttatgctcattttgtcagaggactctgagtcatttgaatttctgttaattgaggtttttttcttttttataaaacaatacagtcctgtgagatggaggaggggctttaaaattcctgttcctctattcacgaatgcatctgtttggtagtgacaaacttcagaaaaattatttgttgctgctagaactgtccatattattttaagatgatctctcaggtccctgaacctttgaatgcctaagacaggacttacaaacatgcatggggccacaggcaggtaaatgagaaaggaactcctgggactgtaggtttgtggcatctgtctgcatgatggatgcttgaggcctctctccaaaggctcttgggaccacgtggcccagtgtactggaggctttaccaaggcatcttatttctcaaaaggagaaggggacttacatcagtcggcgaatgaaaccctgtacctgaagaagttgctttgagatgacagcaaccaacatgacgtatgtcacactgtgagcttctgggtctctcctgcccagcaggtctaaagcagattgcaagcattgctttgctgggtgagaagacacagatgaaagcagagcaaaccaagttaacaaaagatgctgagaaagtgaaagacctttgcctttgttttctctttgcagactggtacagagggtacctcataaagcataaactgtcacaggtaaggtcactttatgttcatctgggatggtgcaggatgtcttcacctggccctgatgcctctcctgggctagtctttcccttcattgttcttcagcaagtgagccctccccagtctctccaactccaactccctaccccccctgcttccaagatctgcacatcccttctttatcttcatactttaaggctgccctggtaccctcttctccctacatcctttgaggacacaacatttgctgatgagttcccatccccaggaaatggtgtactttctagtggaagctggcctctgttccttccttcagtgctgtgtgagcattcactcatcttcccctatgacacaaaaggacaggcctaggtgcccttccagataacagagtcactccgtcatgtcatctccacttgtgttgtttcatttcaactggtgggcagcaaggtggtcacatgatgctcctatcatgcatcctgcttgacatcagggagaaatttccaagcagttgatcaggtttccttatcatctggggcgtagttatgaagcatcttccatggagttcaaggaggcacaatcctgccccgccctctcagaggacagggacttaaatccagggaggagagatcccacatctcagacacttaagtaaagccaaggacttgcttcagacctagggctctcctacatccccttcagggacattaattccctggaggtgggcaggaaggagagaagtgagcttgtctcagcaagtgaggggctcaggccccggttctattgatctttctctcttttggtcacctgaaaaaaaagcactcatggggatactgggctcttttttggggttgagaggtgagaacatgaaggcctatacacatgggtttggaatctgtgcctgctccatctaattctcagattagtctttgaaagttttgtggtttcagaagccagtggcttagcaggggaaggaaactggaaaacaaggagtctgttatttttctatgacttgtcttccatcctatttattgtgtttcctacagggcattttccctacatcctttatccatctcaaggaagtgacagtggagaagagaaggtacttgtggggactggggagggactcagttggtaaagtgcctgccttgtggggaccagggagggactcagttggtaaagtgtctgccttgtaagcatgacccaagctgagttccttcagaacacatgtgaaaggagctgagtgaaatgctatatacttataatcccagtgctgagctgagggctgggatgacagccgggtgcctgaggcccttcctgcttgtcaaggtccaggctagcgcaagagtccgtctcaaaacaaaactaaagccacaaacagcaaagggagggggttgcccctgaggaacagtcctgtaaagtcctccggcttctacataaaaagcacatgtgtagacattcaccccgccaacacacatgcgcacacgcatgcacacaggcacttgcgttacttgacagcatggtctctcctggctcacggatgcctttgtctagttagcttgggccatctaagctgtcaggtgggcctcaggcacccggctgtgtgtgggttccagctcacttttcactagcagctgcctttggagcttattaaagtagatttgacttgaatagtaagtatgaggaagcaccccttgaagaacatttagagagaagtcccatttgtttgcacgatgcagtctgtaaccactgtagcttcctctccagagctgcaacttgctgtgaagtttccagaactttctctcttttgcacctgggtctcagttctaccttgctctctctcccatcctaaataggaacatagagaacatcattcctgcagaaatccctctggcacaagaagtgacaaccacgctctgggagtggggaagcatctggaagcagctctatgtggtgagacgcaacctgttcccgggacagacgaaccctgcagctttcactcaggcttatgattggcatttagccttcagtggagctttgagagagagaagagagaatgcatactatgacatacaaggacactgagacccagagaggttacgtgctttctttgaagccacatagctagcagtgacagctataatcaatgaggtcgggtggaagccttgtgttttaaaacaggtgcaaaagctgttgaccttgggtttgcatatgaagtgccttgatatctgttcataaaataaatcctccaggtctttaatattctcaggggatttgatttggtgtgtggctgacgttctgaaagatgcccttatcatatgttaattaactgatggccattgtcttcagatctgtgaagaagctttgaccctgaaaaaaaaacaaagaccacattttatgtgttttctctgtttcaaagcaattttaatttaaaatcctcctttgatgcgtcaaagtgccagatgaaaacaattagccaagccaaccacgaggctgagaggggaacgtcaagcaaacttcctgcgagtttgttacagccccgtgcgcacccattgatgtgtgcccgctgcctgtagactatagtctatggtagatattaacaccatgtggaaatctcctaacaggaggaaattagcatatccagttctgtaaggttcccaaaggctgtcagtaaaacgtagagtatgtatttttctgctgttcattactgtacctgaggcatgctgacttataaagagccattcttaatggcaaatttcctgggtggtgctgaatagcaacatagtgagggatacatgtgtgctatctaatagatgctccttatctttgattcaatcattggggttcctaaagcctaccctctaaaaatcccagttgagttacattttgacccctatttcctcccaactcagataaaaacctagctcatgaaacctgggataagaatctggcgcaataatccttgcagatcactcaaatcatacagcaaacagaatccttgtggcttgagtgagtccttgttcctcttcactactctccctaaaacatctttacatatgtactgtggacagctgatatgctcctccaagaaatggctctatagcaagtcagccacgctgtctactctgcaaatagaaatagtcaaatgtcagtggtttcattattgggtctatgacttttgccctgcctgcacagcgtatattggacccttaatacctaaatttggtgtccttttagtaaatttacatgaaaataatttatatgaagaatgtttcagcatgccctgttatcccaatatcacatttctgattactctaagccatgtacatgcctgacaattcaattagccgctgattgtctagaagttagccttagactccttgcttagcctaggattcagatgttagttacagccagggtccctaggatatttgtgtttctgttgcagttggctacaaattgaggatcctcactgcctctccccacctaggggaccaccttctaattcgtaattcattaaaattatgtaggcttcataattcattaaaatttcccagatcatgggaaagtgctatatataagatggcagctgcattgtaaagggtataaatgcaggatctgcctgatggaagagacaggtagtgcagtcatatcttctctacttgagccacccttgccagttcataaatgcctaccacttgggattctccaccaacttgttgctcaagagtcttaattaaagttgcagtacataaactttaatgcattgcagcgtctgatcttggagagatgaggtagttcagagccagcctgaaaatcccatcccctaatcaattctgtggctgtttttttctggtcttcagagcctctcctgaagctgtctaggggtccagtaaagttacagtgttagcacaaaaccaacaatggatggcagaagctctttcaaaaccaccaaatggcatttctattgcttagtatgtcttttaagggccttatgaacactgttctaggccagagaaaaagactaaatatatgtttttcattataatacaatacttttgctaagagaggggtgaaagcatttgtcatagttagaagatcattttccaaataaatgcaataaaaacaagacaggccaggagtgtcagaacactcgcctaggcatgggtccctggaccacataaaatggagagagtgatctgagcgctagtatgcacccattgctctcctctgagcgctagtatgcacccaatgatctcctctgagcgctagtatgcacccattgatctcctctgagcgctagtatgcacccaatgatctcctctgagtgctagtatgcacccatatgctctccgatatcctaaggttcacgagatgtgaccagctgcttcaggctcctgctatcttaactttcctaccatgatgcactgtactttgaactatgagcaggaataaattctccatcccttgagttgctcattgtcagggtaatttttatcccagcaacaggacaagcagccaagaccagaaacccagcactattactcggtgattgttacagtacttgtcaaaaagctctgtgcccttaaccttcttgttcttgatcagaaatggactgggctggggaggtggttctgcgagtaaaaatgcttgctgggcaagcaagaggatctgggtttggattctcataccctgtgtgaaagtcacatggatagtgtaaccatctgcaatctcagtcctcctgaccagagacgggaggcagagatgagagaatccctggatgcccccagaccacccggcctggcagacacagcaggaaatacagcaagagactttgtaggagaggagaggggcctttcctctgtcctctacatatataccatgtagcagatttgtctgtattcatatacccccacacccatcatataatatagcaatacacaccataacacatgtgtaagaagaaactatgactttcttttcctgttaaacaagatggaaagaaaatgaggatcacatggtgggttagagtaacttgacattatacacctgcccacatattctgcatcctacaaaaaccatgtcttgggaaacaatgccctaaccatagccccttctatgagagaaggtgtcctggctcccagtcttaaagggcccaagttctgttgctttcattatagcagatgttcatgtgcaccaagtctatttgtgttggaaattctccccacccccaccttgacctgaaagagatgacttaagagtagtgatgtttgccttggtcattgattctagttctatagtttgacatggcatcgcagtagcagggacacagagaggagaagagctgtctacatcatgatggacaggaagcagagggtggggcatggggcccaagactgatataccctccagtggtccaccttccaaagaagagccatcaataagaccaagcatccggtactcaagccttaacacctttctgggtccaagtcagaaaatcttttcttttcctgtgtctttagttattttatttctttaccaaaggaaggaaatgtttgaaaaaacggacttttttgagtatagctgttgggtttattttttatttttattttatgtgtatgagtgaattgcctctgtctgtgtactacaagcatgtctattcctgcagaggccagaagtgggggagggacagacctggaactggagaccaacaagtgttatcaattgctgagtcacgtttccaggcctggctgctagattattattatttttttaaaccaagaagtgatcaagaatatttctgctttggggaattccagtggcccaaggggaaggaccatattggcagccgagcaccaattctgtccctttgcagctgggtaaggctgggagagtggtcagattgtactcacccaactgtggcctagcttgccaaatacctttgggtaggcattcacgattgcttccatctcataggccagcaaaaaggaacgcttcctccaagtgcagtccatgatgtacgacctgatggaatggcgctctcagctcctctcaggaacgctacccaaggatgagctgaaggaactgaagcagaaagtcacatcgaagatcgactatggcaacaagtacctcacgcctctgcaaattggcttccctttcctagcctctccttccttttctctcctggagaagtctgctttcacttcagactctggagtctgccactctctatttgggagaaggctgttatcttagccttgcctctgtgtctttgcgatcacgccctggggtcccagggacacatgagcggaatggaggcttgcttatgcagtggctattactaggtactgcacaggtttaggacactatttaactacatcccagggacaggggagtatagacaccctcacgttcagcttgatgcctctttacctctgctttgacaaagctctcctttaagtcctggtgtgaggtttagtgtcccttcccccatttgaagttatccaagccacctgcctccagctagctcacacagttacaaaagtgtttaccaaatggaaagagaagcaagaacggcttgagatttgaatgctttggcataaagaaggaaatgaaacaaattgccgaggcaagctaatagcagtaacagtgttagaactaacactggattggagcttattaagcaccaggctttgtgctgagtttctcacaggcattgtttcacttaattcttttaataactccgtaggatgtgtagttttattacacccattttattcttcattttagacgagggaactgaggttcttacagactcgaggttggggctggagagatgtctccagagttaagagcgctcattgctctcacacgggatgctggatgccagttcagtgccccacacaagcatggtgactcacaactgcttgtaactccagctctagaggatctagccctctcttctggattctgagggaatctgcgctcacacatgtgtgcacacataaacacacagttaaaaataaaatagttcttttttttttaagggagtgaagttaattgttcaaagttctatagctagtcaatggcacccccaggctatagacttaagctgtgttagaaaagaattaagccccacccctctttttcagttttttgaatgccctgtgtatattttcacttattccaacataaatgtgtgaagccattataattggattgattttctattaggtgtgggtgctgcaaaaatgcaagtccctatccatgaagggttaccagtggctgccgtccagtccagttaggagtatgttatgagtgagcacttgtctactgtcatgagtttgatagcttagtattcaagaagcaagaatatttttcataggggaagctctgtggaggagatggtccttgggctttggaggataaagggtttttaagtaaaaagtgaataccagggtgcaggagaggtcacagcctgcttagactgcagagaggggaactgaaccctgagcctgaggggaaggaaccctccagagaatagggtgagcttacttggtagtcaggctctctggccttcatcatgctcaccaggatggggctccaatgcagagagctgaggccagagtctacctgcttcccatcccagaggctcatcctactgtcttggaagtgtatccaaatctgtttccacggagtgtcatcccacagtgataggttgctatgcagacgcttctgccatgcctaggctgatgtcttcagttgaacacaaagcatgtgagaattggaggtgttttctgctttacagagtagccttcagatgctatctcctcagtggacctcctgaggtctagggtggtagaaatggctgtcacttgtaataaggcctcctcatttcccttactgaccacccggctatgatacgtgtccctgcagcccctgtgcacctgggatagccatcatcccctccgctctgcctttcctcacatccagagaccctctaaaccttgactatctgagtcatctctctgactcagtgctaggggatctctcccacagtgactaccccacaagtggtaactgaatgaatgggggggtgacaatgggagagagaagaggaagacagctcaccataaactaggctcccctctgtaacagcctctagcccaacccagtgtcttccatttcagccattccctttgtggaattgcgagatgtcccaccgtggggaccatggccctaagctaaggggctctttgcttcttgcttcccttgtctgctgcttctgctggaagtgagagggagctgggctgtttactattacaataacaccctggactcatggctcttgtataggagagatggcttccttgcatccaggatgccagcatctggacagaacttcaaggacactagagtaggcggaaccccaagtcttagcaatgtcttaagagtctctccatcctgttgttaagatagcagacttccagccgggtggtagtggcacacgcctttaatcccagcacttgggagacagaggcaggcagatttctgagtttgaggccagcctggtctacaaactggttccaggacagccagggctacacagagaaaccctgtctcgaaaacaaacaaacaaacaaaaaacaaaacaaaagatatcagacttccattgtacataggatagtgtctttgggtacagagatgtgcaatgtacagtacagcctctgtgaaaaccagaaacaacaataggaattagtaggcacagacctttgatggaaaccttgggtgctctctatgtggcaagcatactttaactctttcccacatagtagctcagctcagccttacaatgagtttataaggtagatactatcatcatttatccaatgcggaaactgaagctcaaggactgatttaggtgccttgattccagaggcagcagagccagagagtatagttccagagtccaagtgcttagggctgtgttcttctgcctccaagagtcggtatggcacagcgaagggggcagagaagcacagagacactttgggtaagaagcatagctatcaagagaggagaacgaatggacgagggcttgaggaggtagagtagatgacaactgccctgactaacaaggccagcaggagttcctggatgttctggctttctctctgttgttgtaataaaacactctgactgaaagcaactcaaaaggggaatggatttatgtggcttacacttccagtgcacagtcagtcattgtgaggagccaagactcaaacaggagaatcctagaggaattctgctttctggctcactcactcataggctcatgcttagctggtgttcttacacaacacaggaccacctgtctgggaatggtgctgcccacagtgggctgcagcctcctgcatcaattaataatcaaggcagttccccacagacatgcacataggccaatgattctcaactttcctaatgtcgctaccctttaatatagttgctcatgttgtggtgacccccccaccataaaattacttcattgctacctcataactgtaagtttgctagtgttatgagtcacaatgtaaatatatgatatataacctctgtgggggtttacacccacattttgagaatggctggtataggtcaacctgttctaggctattcctcaactggtgactctaggttgataattaaagctgactaggaaactaagtgaagtggtacaatggttaatctggaccgtcaatgggattggattactaaatgcctaggggattaataatacactagtccaggtatgtgtgggaaggtgttaacagggatcttgagggctttgtgtgtttaaatgccttgactaattcatagtatgatggcattattgggagataacaaggacaagtaggtctctaggggatgtgtccttaggaaccacattttactctggctcctgtctggatcctcctttctgtccttcatggacaccatgctatggactgcactgccccaccgtcatgtccccagcgtgatggggtgacacctttgaactggtgaaccaaagcaagtccttcctctcttaaagctggtttcctaaaggacttggtcacagcgaccagaaagtctgatgagtgcaagtggttaagagaaagtcggagcgacagtccaggagatgagtggggagtgcagattagctcggaagaagcctggagtacccagcagaaaagcttgcatttgttcgaagtctgatagcgagcttagcaaaatccaactctgtttccctttattctccgtcttttaaaaatatgtgtggggtgtggagtttcctgccttacctcttctcggatctgtagtaccactttcttgaaccaaagagagcaaaggggctccctcctgaggagaaaacacatcaaaacttttcagtcttcacaatgaatagtgctggctcagcgtagcagtattcacttgaaagccagcctcacctgctcccaggttccaagagagaacagtggacaagctcttccatatccaagcaacgaggaatcatcaaatgactcctcaaagtcccaagatggctggacctgggaggatgttttattcattcagttcagaactgaatccactttgatcaattttgaggggaagagctagagagatctttcggctaaattatgtatcggctctgctccatcttttctggggtcacatgagtctctcctcagcattagctgagtgcctttatcccccttggcatcactatctgggcagcatggccatgcaatgctatgagtcatatctagctggaagttaatttcgtaatgaatgtggacaaatgggtgatccttggctcccttccgtttgtatttggatgagatacgagacatgcttctaaatttgcttcttaagagtgtagagccatgtccttcatttgcccttgatgttccttgaaaaggctggtctttctaacggggcccagtaagatgactgttgaccctctctaaacttccagctctcctccccttttttctaagcatggatgattgacacttgaacttgcatcaaatgctaaaggaacttcaaggacaacctgccaacctgcccctcctctcagcccaccctatacagactcctaagagtttacagtaggggctcaaagtataggcaggggtgctgtggtagcttatatcaatatggtggttttgaaaaatgaactacctccctcttcttagtctcttttaaataggaagagtagtagaatctgcttcgcagggtggttgttgttgttgttggtggtggtggtgggtgtgtgatcagatgtaaagtagttaatgcttgtgtgagtttcctgtcagtgcatggtgagtgctgttgctatctttaataacaaggagaatgacagacgctgttgacacagatcaataccaaagaagcgaaagcccgtggcctggaaaccaagcagctgaagaacgagcagtgggcagcgatcaatacatctcagatagttttatcccgacaaccattctcacacgtttattgaataatatatgaatacttctgtgtgtgggcgtgagcagcgaaacattaaacaaactgaggcactgcacacgccccctttgactacttcatatcttccagccccaggccctctgcctttctcttgggtaacccacgtctgtgatttgctcctttttggcatctagatcactgtacatggctcttcttagccatacacagaaaacacatctggctaggtttgttgtgcctcattgtgtgcttcgaactatttcacataaaatacacaattttcccatattgttccatttgtcccatattgtcccattttgttcatggaggtatttttactaagcaagccaaaaatgacacactatctttctgtgtgcatgttttcatgcatgtagctgcacatgtgtgtgcagatggagacacctatggggaagtccggtaggatttgttcctctggctccattcattggttctggtttgttttatgtagggtctctcactggcatggaacccaccaagttggctaggctggtcagccaatgagctctagagatttgcctgttactcgagcataggaattataagcatctgtcaccatgcctgcttttgttatgtgggttcagagactctaactcaggtcttcttgcttggaaagtaacattttcctgactgggccatcttaccagccccaaacaatgcacttttaaactccactccctcgtttcccattactgatcagtttacttagccatttctcttttagtagaggttttagcttttagtcagccgtttgctgcagacgccatcctaaaggcctctccagcgtcacctccagctcttgccttacagaatccttgagctcgatctcattgtcagagatgaagatggaaacatactggaccctgataagaccagcgtcatcagcttgttccatgctcacgaggaggcaacttacaaaatcacagagcgcatcaaagaagaaatggtgagttttgttcggtagcctttggctatgtaaagctggcatttagcacatcataaacctaaaataataggctactgcactgttattcaaggggccatctggcctacaactgagatgattggaaacgacgcaagcttcattattattacttagatctgtaagtcattcagcatgcatcccacaggcagttaaatgccagacaaatttccccatctcctggattctagaataaagaagagaagaaaggcagtgaagatataaattaattaattaaaaattaattgcagctggtgataaaaagcaataaagtaggcactgaattaggagatgctttaagaggcagaaaaggtctttcggaggaaagagtaacacggaatccaccagtactggggctctggtggccagtgctccaggcagagggagcagcaagtgtgaaggccccgaggtaagaccaagttctgaagaagtccagtgtgggcagggcatggtgagcttgggagtggactggtttgcagagacaggcagtggagtctatgcagagtctgcttctctagagcagctcaggggaactgtggggaaacactcagatgtcagtttcagtaggatggcaagccaacaacagacttcaaggaagaccaaatctcatttatagcggccatgtgtcattttttattatttcaaactttaattttttttgaaaaaattgcaaataaaaacatcatgcactgaaatcaattattcttgtataagtacaaaaatagatttgatagtgaaagtgtaatatactgtgaagcttcatggcttcagaatggctgctccaactgtatagttcattaagatgtatagacttggggtctggttaattgctatgcctctttggaaagcaattacatttttagacttatagtgttactgctctcatatagtaaaaattgctgtctcttaagtttcacttgggcggatgttagtaatatgtggtgatgtatattccactcaacaattagcatattgacagttctaccactgtaccacttcttcatgcatcttccttatcccgaagccccaggaacctctaattgcatcctcttactagttctgactcttttagagcttctaaatagaatatccatttttctgtcttggcagttttgacttagcatgttgctctgggagttcttttcagtgctgagccagtatactggcgacctaatgttgacgtggcattgtcttagggtttctattgctgtgttaaagcaccatgaccaaaagctagttgagggagagaggatttatttcatcctacaattcacaggatacactccatcactgagggaagtcagggctggacctcaaggcaggaacagaaggagaaaccatggcacagtgctgcacactgccttgctcctcatagcttcctcagcccgctttcttatacatcttaggaccagctgcccaggggtgccactgttcccagtggtctgtgccatcttctcccagttagcaatcaaaataattctcagcagacttaccgataggtcaatcttatgaaggcttttcctcaattgagggtctttctttcctgacgattctagcttaggtcaagttgacatgaaactagtttaaaaaaacacaagcacttatgagcagattctctttacagcttgtggtttttatgatactagcttcatggggaattgtgggtcagtggtgcgatctccaaggataggcagaccaaagcaagcagagtcaaagagaaaagcctcagactgcagaagcttgttgtggtagaggtggctggatgctcaaagattcaggcttacaaggggaggggctcctcaggacccagagagctttctgttgctttaagtggcattgggatagcatgttatatcttctcgttttcttcttccttctaccctacagtcaaaagaccagccagattatggggtttattctcggatctcctcatcccccacccacagcctctacgtctttgtgagaaactttgtgtgccgaattggggaggatgctgagctcttcatgtctctctatgaccctcacaagcaaacggtcatcaggtcagtgtgttcggtgtggcctgtgggaagttggagttggaagttcacagaggattgtttcttccttatcactctctctggagtaattcctaccggaaaagaaacaatgtctatgatggtggggggcgggggggggggggagaacccttttggaggctgtgggaggcaggtggaagtgttatttgatgctagatttgttttctcagcggatttatggtgatgataatgtgttttggttaccaaaaattatgagagtcagacaaacagcaatttgtggactaaaaatgcctgtggttaaaacaggagctgaggaatgaatggtgaaatgtctccgatctccataaaagcccacatccttgttctggtgtttgactttgcttaaccctaactagttgctagacatttgtactcccgagtctcctgtttaaaaaccgtaagcactgatctctctggctgttattttcaggcttcaagagaaaaagtacatgttaatatgggcttggcataccaataggctatcaccacatgtttatatgggcctggcataccaataggctatcgccacatgttaatatgggcctggcataccaataggctaccatcacatgataatatgggctcggcatatcaataggctatcatcatggctcctttatattgactgcttttgggtgcggaggaagtgagggaactcctgaatgcctcagctcaagaactggaaatatctttgggaatcttgaaaaatattgacagcccctggatcaactcccctcacccatacttgtggctcagtccttgcttcagctgatcctcatctgactccatgtggtggggttttggaacacctagtctccatttgagcattagaatagatagagctagattataatcttttggtgtttgtggtgaaaatggtgttttcctagatcactgaagtcacgggcagtgcctagtaaatggtggttcaccaggagatggtcatatgtggtagggctgttcatctaggaagactgcatataggtctgtattcaactcatttgatcctagcatgatatttaggtgggaaggtgaaactcggaaagtcaggaaacttgcccttgcccaaagtcatacatgtttataaatgacagagctgaagttatacccatgtccacttaacttcaaagataagttattccccaggcaatttttgccactcaggtatgagttatatcacgtgccttgtatgatcaccaccagagtttcagcaccattagtgtggaaagctagactttattgaacacctaagtccctgccactcacctggttcagtcttagtggatatgatactaaaactagatactctgtcatatccactagatactagaaaaatactagtttctgcttctataggccattttacccatgtgccataggcaaattcctgtctcctaacgattttactgtaggcacctgaggaaaaggtcttaacagcaccattaggacctcagtgtcccttagatacatggcaacttgggttttcactagtgagggttcctgcccctctcattcactcattgatggatggcctcagtcagctttgtgaagggagatgatagatcattgagatggctgatgtgccaccctggatggaacatgtctgagtggtgtctctgggagtgccagggacacagggcagcaactagggagaggaggagagaggaaaaaagtgccagaatcttgaaagtaccaatcaggagaaaacaagaagagagatggggaaggggcaaagagagctgggctcctccccgtgcagtctgactcagattagatgctccttctctcaagctgaaatcctttctactcctgcccagtctagtcacctactatctcagtactagtctaacctactatcccaaccagatgttaaggcatcctctgtcagggttcaaatgggaactggaggcaacttatttggaactgatcttttcaggtcaaggccatttgtggccaggttctcaggatctccaaagagatctggcttggaaattaaaaatacattttttttggtaggaaaaagatgctgcagcacaggcaggaggccagaactgagcttctgtcccaaggagtccaagaggatggggcaatccttcctttcccttacccgtgtgttgatggttcaagccttcagagtctatcatcggctcttcttgggcaaggatagatgggagcagctcagccctctaaattgcttttcttatttatgattacatttctcttagaaggaaattgctggtgcctgctgtttaagtggaataggctggccataaaggggattgtaccatgtgatgaaaagtgttgggcagaacccaggcacttcaacacgagcaacccataaataaccaagggcggtcatttaaaaatgtctgatagagccttcttgctatcaatagcaagtgtctggttgatagcaaatttgctatctatcccactgaaaattttttagctttaaaaaaatgaaaaaaattgtacatttaatttgattgcattttaactgtaagttaattgaaggccagactccatctgctcaaggttccgtacccttctttagtttttatcctctttaaccctctgtgtaagtctggctgggtggagcaggtttgccatctcagctattctagagactgaggcacgaggaatgtgagtttaaggccacccttggaaacttaaccagacctgttccaaaaccatcaccaacaacactcagtagccgagcactcacagagcatatacaagcccaggcttcaattctccgtgttttccaaaaagcaagtgaaaacaataaactggcagtaaaactccagacaaataagaagtaccattttgagtgtagggaaggggagagagagattgagaaagagagagattctgagtaaggcagttctcgttcacctggtgaattattttatgctgcctattgggattgaatttggttatattgctattttatattttattaattcaaattaatgggcatttatttggcaccaattgtatgtttctgcatggcatataacgtctaatgtctcatggcattacatcacattagcactggaccttgaagtcttcctggcctgggtgaaccaactatatacccaggtgtatatagttgtcagtagaggtcagatggcaaatggtgatgtttgagtcttggggcatctctgagtgacaagttgccaccatcccctcagataactcttcactgaatttccattactttagaattttttagaagtttattttattctatgtgtatgtgtgtgcctgtttgtatgcacgccatatttgtgaagatgcctacagagaccagatgagctagggtcagatactctagaattggaattacaagccattgtgatctagtctatgtaggtgctgagaaccaaacctgggtcctttacaagagcttcaaatgctcttaacccctggtccatctctctagatccctcccattagtttaaagatagagtaaaataaaactccccaaatggcctacaccttttctctgggtctctttttaatttatcctctgactatttaactcttaatgctccttcttagattcttttcatgaccgttgcatacatctttacctcaccgataacctttcatggtccatcctcaacttgattatgtgtttttttttccttagcaaaaatgtctctgaccatgtagactaggataaactttccaatgtgcattcttatggcatcttgaaagtttcatttagaggtcacttgcatatcactattatgaagttgtcaaatagccttagaacagtttattcaaactgtatcaaaagtaaaaactgtagtagggtccatcatagtaagatattctattagtagaaacagttgtactcccaaaagataacttcaagaatccaaattcagtgtgagaaggagagtgggctggaaagggagggagaagctctcggcattctgcagagcctgctaaaatcctgtcctttctcatctctgactttctctataacctctacagagtatgcagctgctcggcaaaaatattaggcagctgtgccagaatgttcttagcagttggggaggaaggtgttcgtggatacacatatgttcataattctttctcccacttgatgtctgtctcccaacataacttgtctttcagagggaagggatatatttttcacaaacactgccctgtctccagtagccacaatgttcaatgagaacatagctaatgctcatccgtatctatgaatggatgctctacctgtaacaggctgctactcttcctcccacagtgagaactatctggtgcgatggggcagcaaaggattcccaaaggaaattgagatgctcaataacctgaaggtagtcttcacggtgagtttgcactctctgaccactgtgctctacacgcccaatgatctggccttgggaagcttgggaaggaggctggctggacattgatcacgataaagcatgggctgtgtgcagagctgtattccaggctttaaatagggattcattgctcacagaagcatggtgtgtccggaggatgctgttgggaacatgaatcacatcctttgctcttccccttctctctctgtttctgactcctgtacacacagacaacatagtactatgtaagcaagtatacttctctgcgcaacagtggctagttaaccctgggcacagaagatactattttattttttagttaattcacaataaatctaattttctttctttggttcaggactttctgaaagcacatctaaaatataccaggaaaaaaaatagcacatttctagaacattggttgccttattcatttggacattttgaatataattaagccataggtaactaaagacctggcaggtccttaggaccatccttccaaataccaatacttagcagcatgacttatatgttgaaggctaaaatcaattgttatttagatgagttatttaggaggttgaacttgaccctttagaatcaaataggggatgcagtgaacagaatgagatagggttagagtttctagcagggagctcctaccttgtcctttcttcactaaggatgctggcattgtctgcaagctcctctggggagaagactgcgtggttttgtgctccattgcctgcattagagagggaaattatggaggaggagcagggatgggttttggcattgaccaaactgacgagtggaatccagaagtgaccgacatgctagattaacctaccttgctctacaatggttttgctgttacagcccattaagtgcagtgtcttatgttacatcgtcattcgattgaggtatagttgatttattttgtttgttatttctagaaaaaaaaataggccagaggcatggaatgggatcataggtcctaattgcttggacagagttttcttggcatatacaaatgtgcttcagtcttttttatctcttactagttagaaggaggagcctatttatttgcttgacaaatagaagagtcccacagggcttcctgattaaaccaagagacagatgtttcatgagacagggaaggacagggaatcaatcagagctttgctgtgcagaggaccaatccatgatgcaaatatgaatgaaaggccatgggtgagtttgtgtcacatggtattagtgagaactggatcctggcttcacgacacggtgccacacctccattttgcagaacaagtgaacttgagaccttcagttgagcggttggacagactagtgctcccctctgttgggatgattgacatctccattttggaacatgaaaggtcatggtgttctcatgttttgcacggattcaagagccacatggaagctctgtacctgctgctaggatacagcagcggataagctgatgcggcccctgcttttaggtctggtagtgtgggacctgaaataatgatagattatattaataattagtataaaattatttttattaatttcatttaaaaacatataccttggatttaaaaaattttaatatttgggggtgcaggggaagcaggacaataaaacgtaaaataaacaccacctgctatcaggtgtgttaccatggctttcaattcatacctctctttcctgcagcttcagacagcaggaaaggaggatttttttaaattaaaattaattaattaatataaaatcaataaacaaagaataagtacatggtaacaatgtcagagagcaatccatataacacaggtatttaaaacagggtgacatgatgttgcatgactacaatctactttcagctgtgatgcttgctgaagcgggacataagctatgactcggcagctggggcattagttgtcatctttctgtgccctttggatgcttgctttctctggtctcttcttcatgggcaggactgtgactccctgggcctgtgaagctggcatatgggtctggctgattgctgaggtcacctccatcagcttcctaagaatttaccctccttggcccacagtaggaaagagggatggaccatgaggcatcctgtgctttagcccaggaagtcacatgttacagggaaagaggggtgggaggtgaaaggcccataatgcacctgactgctatagttcagctttcccccaaatggtaaaactttgtaagaacaaagtagaagtgactggggttaggggcaggcagccaatggctggagcctacaatctcaggaaggattgctggtttacacaccatcccaagaattctcgctgagttgtgaagtgtattcagaaagtttgctgtggtaatagaatatccagattttctagggactggggtgggctccacatgagaaatagggacaatatagaaacgtgtctcaagtgacatgttttctaaggtgggggggggaggggatgagacctcagagcttgacaaggctatcaagagtattagtttgctagagctgctgtaacaaagcttcttgacagacatttattatctcagagttctggacactagcagcagtgcgctgatgggtaggtttgtctgagaacgattctttggtttgtagacagcacttttcttcctgtgagtttttcatggtcatgtgtacatgtatttatttgagctgcatgtgtgcatgcatatgatcatgtgtgagtgtgtgtgtgtgtgtgagagagagagtgtgtgtgtatgtgagagatgcatgtgtgtatatgtgtttgagagtatgtgtgtatgtgtgtgagagagtgtgtgtgtatgtgtgtgcgagagttcatgtgtgtgtgtgagtctgtgtgtgtgagagagagaaagtgagactgtgtgtgtatgtgagagattgcatgcgtgtgtatgtgtatatgtgtgatagagtatgtgtatgtgagaaagagtgtatgtatgtgtgtttgtgacagagagggagagtgtgagagagggtgtgtatgtgcgtatgtgtgagagtgtatgtgtgtgtgtgagagagagagagagagagagaatgaaagagaatgtgcgtgtgtatgtgacagagtacatgtgtgtatgtatgtgtgtgagagagtatgtatatgtgtgtatgtgtgtgtaagagagttcgtgtgtgtgcgtgtgtgtgtgtgagagagagggaggcagagagagagaatgtgtatgtttatggcttctgactcctctgtttgtgaaaacagacattatattggattagcccattctaatgacctcactctaaccacactgtatctctaagagctaagctcaagtgcagccatgttctgaggtgccgccgtaagggcttcagcagaacaattcagtgttggtggaaaccattcaggtgtcaaggcctcaatggctctgatatttctcccaaatacattggtttacatatttcaaaaatataaaaacaccttaatgagaggggaaaaccaagaatggagttcattgttaattcccgaggacagagatcttgagcacagagagaagttgattatgcaaaagaacaagaggcagacatttgaggtggaggtgtgtttcagaagaaggatccagaacttaaagagagtattgtatagctccagagcactaaagcaatctctgtggataaaaatagagagaatagtgaggagtcagctggcgaggacagctgggtgtattatgtctagtccctttcatgtcagcttggacggaggaacactaacagggtaggaaacaagaagctattaacgttgctgaggatgagaaacacaaaaaagacaagacaaccccccaaaaaaccaaaaccaaccaaccaaaagccccaaacccccaagacccccaaaatctaaaacaaatccaatatgtcatcctgccttctgcagatgagttcctaggctgctccagactggaatggctaaaggagtcctgcggctcctctggggcaaggcagggtgaagacgtagcaggcattctcagcttacccttgcattccggccttctctctctccctgcccctaggggtgattccagtgataggggcaacattctttcctccaccagctggcaaaaggagagcccttcgtgattcagggtttccaggagcaaccgagaagatatgtatttgaatctgcagggaggcaagacagctgagaaaaacagaacttctggcagttttgagcagagttccttctttggcaagaaaacttggattttgctatgaaggctttaaacatggcccatggatgttatggaagacaaccttattcactgaagtcaactgactgatgaggttcatagcaacttggagattactgtttgaccagtcacacatcgtagcctagccaaactggaacaagagctagaaccggcccatgtccttgtagggagatctgggccatgccaaagtgttgtcttatccccagagactctgtcctctgcttttcctctttctcattacagtgagaggcaggggctggctgctttgcctgggaactgaccctgatgtgagctggtagcttgtcccctgtgcatatgttcacaagagaattaactcagatagtaagctgctccctggcatggacaggccaagggtcgcctgtctaagccagcgtaatagcatgtcttgctgtttctgccccagctcatcctagctggcagggagccccaggaagacaggcatctaaatatactgcagaggatgacgtgatgctcggggcacgcctctgtgatgttgcttcagttagtaatctccatcccagacttgccaagggccaaggctatgatcccaaggaagctttcctatagggcaagtagatgcaaaaatagcatcattttaatagtacttgagcacattgtcagggatcagatgagatgatgcagcagggaagctacggagtcctgccacaaaggatctcggctgagtcttgccttccttatctgtccaaagaggggtgtggtaatgtccttttcttttcttttttttctttctatttactaggtattttttcttcatttacatttccaatgctatcccaaaagtcccctataccctctccccccactcccctagtgacccactcccactttttggccctggtgttcccctgtactggggcatatacagtttgcaagtccaatggcctctctttccaatgatggctgactaggccatcttctgatacatatgcagctagagacaggagctccgggggtactggttagttcatattgttgttccacctatagggttgcagacccctttagctccttgagtactttctctagctcctccattgggggccctgtgattggtgatgtcattttctaccttctctaaggttgatggtgacattaaaatgataatcacagtcctttaaatgacagttgctttgttcctgttttacatgtttttattaaatgcacaaccataactgttttctctcctgcctttacaggatcttggaaataaagacctcaacagggataagattttcttgatctgtcaaatagtccgaattgggaagatggatcttaaggacattaatgccaagaagtgcacccaggggctgaggagaccttttggggtggcaggtgatgactgatgttctgcagttacattttattatagcacatgttttatatagctgaattttaaagattatttccacaccctcacccctgcaaaatctgggccgagcagctcttccctaactacatttgtgacgactaaccgaagtcaccggtgactaagttcagatttatgggaagctcggcagataatgtggtcctgaggtcttgcacagagcacccaggaacgctgtgccgtctgagcagttggcgcctccgctccttattgcctgtgaagaaggaagaacaatacgctccagatctaattatggggagcaaatcattttgagaaaagaaagatatccagaataggaaatgcagttacacagagtgagtcatgccatccttctgagttccagatgagagcagacattcagatgagagtgggggcactgcagggtccttatgtgccgcccagagccacacagctccaccttgcctctggtgctggctgtgcatgcacccagagcttcatcattcctgccctactttcctgggttacgtgctatctctctggctattagtggaaggaactattatttacctaatatattttcttttttaattaacacactttatttcaactaaagtatatttttctcaaaagatgatttaaaaacccatgacattgcaattggatataccacttttttttctcattattaaaatataaattgggtggggtgtgtgtgtgtggctggaggaatggctcagtggttaagagggctcgctgttcttcccgaggaccagagttcagctcccagcacctacatctgacagctcataatcaatcacctgtagttccagctccaggtcatcaggtgcttacagacctctgcactcattcttacacatgtgtgcaacatatatagatacataattatgagtaactaactaataaagcagagctttcaaagctgataaaaaaatccaagttttacatcatgaactcttttaaacccctgtagctcatccattttgttatcttggaatacttccttctaccattacaagtcccctggcttcccagtcatccctcgcatacttgcatactgcctatgaagtcagttggcaaggctcacggattcaacagttctgtgtatgtgccatgcgcacggttgtggaaagaggctcttttattgcatgcttgggtcctgtggatttcctgccctggggttttgtgggtaccaaagagagtcagtagatacagtaacaagaaccttgttgctcaacttccaaccatttcctttgccttcttctgtaccctagccctgccccatgttgcttcccttctctcctgttttatgatccactcttctcttcacccctgcctggctgaactaacatccgttcacttcctctgtctttctagttatggacatcaccgacatcatcaagggcaaggcagagagcgacgaagagaagcaacattttattccatttcacccgtaagtcactcccgtgtggctccaggctgtccaccctactcttactgctgccctgggtgaacttgttcctcctcttagtaagggggtaggtgggcctccaaagagggcaccctgacatgctaatgatccagaaacttctactgcagccagaggaagagtgccaggctcaggggtgaagtagtagacaaggtcaatgtgaccctgcttatacttcagatgggtaattaagcagataatcaaccaaagcttaaggcattaattacaagtgtagcagggaccacagagtgtgaaggagcagcctattgggagccctttgtggaagccacatatatatttgtgacatgagaagcaggggcaaccaaggaggtaattataattttttttttgcttgaaaatgacccatgttgagagcagtgtcaagattgagcaccacaaagatctccaggtaatggagccagtgactctagccaaaggtgagtgactaggtcttccggagctactgaagtccttgttaccttccagagaagacattcatgtcagagccgtagcgatctctcctgtcacatgaatgcctacgactgtggcagtcattggttgcctcaaatcgcagagccatactgtttgtgaagagggtgttgctttctctgagctgacatggaaggctcactttgcacctaagtggtgctagatatctcccatgtggaaatctaggacacaagatggagcttcccatcgggcaaagcaggaacatttgtgctctcttttccttcctagggtctcagctgagaacgatttccttcacagccttctgggcaaagtcatagcttccaagggagacagtggagggcaaggtatggagtcaccatcatacagagtccaagtacgataaacttgctgcagctcaggagcctctgcgacatcagtaaatgggtccaagtcctggactagacagtacagtgggaagcatgtggtctgtagaccacccatggaagcatgggatgggcattcctttcataagtgacagtgaggagttgctctctcctgtgtgctgccctttaagttacaagtggtttcatccttacccaagtcctgggatacatgagctggtatcctctctgctttaggagactcgggtgcagagattgtaataactgtcagaggctgacccagctataagtgaacgttgcccagagcccctggggttggcctgttgcatctgtgaatgtatctgttatttcagtagtctcctataggagagatggaggagaggaaattggggaggggggagggagaaagaggaaggaagaggaggagnnnnnnnnnnnnnnnnnnnnnnnnngaagaggaggaggaggaggaagagagacagagacagagagacagagagacagaagctgaatgttcatgtgttcccttccaggcctttgggtgaccatgaagatgctggtgggggacatcattcagatccgtaaagactacccacacttggtggacaggaccactgtggtagcccgaaagctgggcttcccagagatcatcatgccaggtgggacacagctgcagtgaccttcctcaagggcagggccatgagcagggctgaggagtccagctgtgtagttcataatttcctaagagtcaactccctttactttattcctctacctgaacaaaaccactgcaaaccatgttttcccatacagtaacatagatcccctttctcccagtccttctttataggcaccgctactttaataagcatttttggagctctgcaacttgctttgtcagtcagaagctcacgggtggcatctctgttttactattcataccaagatcccattttactcggggggggggggggcggagtggtgctactctccagcttttagagcatattttatagtctgaaggacccatgcttacagtaacatgtccaaacgccatacaaggtattcagaagtccccgcaagtctctctgtgcctctcctattaactaaccatgcctattagtgcattcaagacatgcttgaggcttttcatgaggcagattgtgtaatgacacgccctctgactcatccttttctctcctgtagctaagtggtggtggtccagggtggggcctgtactgtgatttaatgatatctgctttacttgagatctcaatgtctgctgttcactcccttcgggagctcactcaacctgtgctcctggcccttcacccttagactctaggattcatgggaaatccctcaaccctacttttgtgcaacaaaaaggcctatccgtggttgagggccaagctcatttcgcttggtgctttcctttaccttcccagaaggtgtcactagaggatggaaatgcaatggtttgaacagagaaaacatggccagttttgagcaccccacctggctttctgctgctgatttttccagcattccgaccctcccttgctacttacatctccatccctcctgtcaggttaaaaaaaatgccctttctaaactgctcggattttcattttattaatggtccttcctgcttctccctgtcccctccacctctgtggttagtgcctgactctaactctggtcttctctccatccttaggggatgtcaggaacgacatctacatcactctcttacaaggtgactttgacaagtacaccaagaccacacagcggaacgtggaagtgatcatgtgtgtgtgcacagaggatggcaaagtgctacctgtaagggactccagagtgctgagtgacaggacccggggctgagggactgatcataattatctgctctctgaaggatcagagttttggggaagacattgaaacacatgatctatactgtgtagcttgcttaataccttgttctagggtctaattagaacctatgttaattagtctttttacctaagcattcttcaatgtatactttcctaatctgtgtctgtgtgtatgtgtataagtgtgtgtgtatgtgtgcccactcttgtttataggttatctttttttgtagttaaaaatgttgttttcattgaagcccaagctagtttaattcaggcaaaatccatggtaaagatcaatacagagccctgggctggtgtggaggttcagaatgtcttcaaagcagacatcctcagcactaaatccaactccgcagcgctcacccagaaatctaggtggaaagtcttattcgcaaattggtctccagagggttagcagcatgcattcaaaaaggcaaagcacatggttctatttacagagcatatgtcctgtgcaatcgttgtcatgtgtgtttatatctatttgcttatgtttcctttaaggttgtcagcacttgtgtccagtgtgtgggagggtttgcttctgaattcttcctctctgaatatttagctgaaaatgagatcatgagatcggctctcagcagaagttacagcgtgggcaaacattcctcctaggacacctatagggagtcagatagcagggggaggggtgcagaagggggagccaccagccctagccctacagcccggagctcaggcctgccacaatgtatctatcaccttctgtctaaaagtgactagcaccctgaagataatagtccccatgtcaggctgggtagtggcaccctgtttgttatcactggaagttcacaaagggagaatagaagttccggcggagtaaaacaggtcttaggtcctgcagttcacagtggcagagatggggattgactcagcctcctcaccacagtgcctgtaaccttaagaagattctccaacatattgccagtttcaaattgaggctgctggcagcttcaacaaaaccctgggaagactctatcggttttaaatgtaaaaaaggttttacaactgtcttttcattcttaaaaccactgtggttaattaattgctgatgagcaaaaccctagcaaaacctcttttgttggatgctaatacttttctgaaaaataaaacgagcgagacacacttggcttgaaagaacacaggggaaggaagacaggaggctcttatctgaaagggaaactttcattttgggaatgtatggatcagtcatttttgtccagttaccttcccagagatcttttaaacctcagcctcatcactaagatattggtatcacttgacttccactcaggcaaaggacaaatcagaagggacagttaacaggcaaactgacaccttgccttgtgtctgatctcttcttctgtctgccattgtcactccttcaagccagacaaacgtactgcagacaagcatgaggaggaagaataaccatgtgacatactgataatttttagtttcatacattagtgatactatggaggagttcagttggctgactattgaaaaattgctgaggaagcctgtgggaggcttttctttccctatctgcagacatgactactactgcacatcgtgtagcatgttcaaatgcccctgcactgtatggtggacttctgtgggaatggtctctctgaaaatggctcagtaagcagtatgttaaccttaacccagccccatttggtgtttcaaggaccttacttagattgggaaattcagagttcaaatgccctgagttcagcatctttcctattattcctgtgatcttagattggggtttttagtcttaaaaacacgcaatgtagtctcttcttacacaagagtagatacaataaatgttacacactcaatacaggagagcagtaggcagagatggctcatcatggctaagagaaactttaggaggaattgagggggtcaaacaggcatcctatcctgaagctagttaccagagatgctgtcgggccaagcacgtagaggtaagaggcagtgtggtaatgtgattaagaccatgacttgtaggaccaggcagccaggttcaaagcccatcttatcctgcattagcaaaagggccttagcctggttctgtgatctctgtgcacccaagggtctaaagtcagccccgaatgggaccagtggtggcaccttactcctgaacgtatcagatgaggtaatctacataatagttttccattactttggccattgttattagaaaggcatgagccctaggttggattccacttgtaggtgttaactggcatttccccatcatgtggccttctcagtgtagaatacattctctctcagagacattcacatctgtggtatggaatgatatggcccaacccacacatgattcctatgaagtcatcgggcatgttttaggaccctgggttcacccaatgagatcacttttcaaggtcaagtctacattaaagcctccaggcttcctgatgtccattcagattttcaactgaaattgtttacactagctggaggctcttatcattagttgagggcaacggaaatgggcaatatgaagaataaaaaccttatagagacaaatgcacttatgtccttaaaaaatgggctcactgctagtcagagtgctttctttatttaaaactatttaaaattgtattcattgagattttcatacatgaacacaatgtgcttgaataaatctactccagtatctcccctccacctcctagatgcccctttttatgtcatcctccaaacttcatgtgcaccttatatttttaaccacagagtccgtttgatgctgctggtatgtgcatggatgtaggaccatcctttggagcataggcaatctacctggcacagcatccttgacatccttagcaaggggtgtgctctgtcagtcttccctaggatgctctcctgtcactttctgtattcacgttggtctcaagtacagagggtgaggtgaggacagtttttagtgttctcagaatagcagtgagacctttttctctggcattaggacataaagattcgtgatcaagatagttttgtgatatccagttgtcttctatgaggctgtttctatctcaccagagaaagatatatattttcagatttttataggctatatgagagtcactgaggctacagagtctgtgatcccataaatgtcaccactgtccatctttctaggctgggacgtgtgccagctatgaaagaagggacactgctcaaagggctagtgggcctcgggtgttgtgccactcagagcctcagtttacccagtaatggaatggtcataacagaagagatcatcacaggtggttgtaaggtttgaattgagttgggtggtgtgtggtaaggacttagcaggatgctaggcacaaagctctttctcaggggtggaaacctttaaaaagcatgattcagtttattgcttatggaagatctgcaaggcttcatcctgtaccaaagagcatctccttcatctccagctcatggctgtctgttctatagaaggggcatccagacaggtgtctatgtcctgtttttcttttctttttttgtctaaatggatttttgtcagaggtaccacagaagttactgtcctattgctgtgaaaagacactgtgaccaaggcaacttatagaagaaagcattaaattgtggacttgcttatggttccagagggtctatgaccatgatggtaggaacatggtaacaggctgacaggcagagagagagagagagagagagagagagagagagagagagagagagagagagagaaagagagagagagactgggcctggcatgggcttttaaaacctcagtgtccaccaccagtgacacacctccacaataaagccacacctcctccaactagaccacacctcctaattcttctcaaagagttccaccaactgcagaccaagcatttaagtatatgagactatgggggccattcccgttcaaaccccacagaagccgagctcatttcttgccagtacctgagcaaacagaggagcttttcagtgttagtggaaggtcctctttcccacagtgtaatgttcaacaggggccacagaataccaacttgtgacctgctttggtgactcagactggctacgggtctgtagtagcatcttacaggacctggtgagaggtctgccctcattcaccagaaaataggcactcaacgaacagtttcagagctagccatccaaaaccaattatcatgttcctacaagtctggagacttgaagttaaagatggggaaaacttgccatgaaaaccacacattggccccttctgggtgactacaccttgggtaacatgctgaggcccaaacagatttaatgagaacaaagaacaggaggagagccagggatggggaagtaactcctgagaatttggaggtggtcacttagctcttttctcaagcactgtgacgtgtgtgtgtatgtatgtgtatgtgtgtgtgtgcaggtgtgtatgtgagcatatgtgtttgtgtgtatgcatgtgtgtgtttgcacaaacatcctctactgatattcatgttctgtgtgcccttgactgagaatgtttccgctcaaagccagcttagaatctccttcaagatgctcaactgtcttcatttctaaggaaactttccccattcctcagctatacttaaacagcccttctttacacacagtagtaatctgtctctgtctctctgtctctctgtctgtctgcagttacatcccattgtcaggaatgactgctgaactcttctgagctcttctccacaaacttgacattatgcctattcctctagggcagtggttatcaaccttaccagcactatgaccctttaatattgttctttatactgcagtaacctgtcaaccataaacttatttttgttgctatttttataactaatttcgctactattatgaattgtaatataaatcaatgacatgcaggttatctgatatgcaaccctcgtgaaaggggtttttacagtccccaaagtggtcacaacccgcaggttgagaaccttgctctagcattgagtctaggtgtggccccagagagtgctcctcctgcgcttcactgaatcattgaaaatctcagcttctcaccccagaattgtttcccagatcagatacccaggagtctttctgaagctgctgccatcttccagtgcccacaaggccctgtggtgcactagttttgggagcccatcagaaagaggcgactgtttgtaaatgttacagacattcactttggggtaaaagtaggattagtaagactggcagcctgcagcaactccaaggctggttaccatttacagtaggcagccacgccagtgcctggcagactccagtgcatttcagaagagaagtaatagaacctctgcagttaggcagctgtcacttccaggctggggatgacagtgtagaaagccataacgtagaaaggctgtcagaataagagcctggcggaagggctatggaaggagaagctgtttttgacttaacattagccttggcctttgcgccaaaaaatgcctacctcagataatggcaacgttgcagtgtttctctccatttttgtcttggtcagaatgcaatttgtgtgggagcgggggataaggccatgaacgagtaccactcagtcgtctactaccaagtcaaacagccccgatggatggaaacagtcaaggtaataataatagtaacagtaacaagggcagcaaacgtttcacagccaatcagacacagtgtttagtgttttatgtaagtgattcacttattgcttacaaccaccctttgtctaactgggcacaaaacaagcaagccacttgcccacaatcccactgctactgtgggtcagagctggggttgcaacgtgagcaaagcttggtcatgctcctctctgatggcagagagacgaggggtgggctggggctatctctgcctccctcttaggagttaagtcttacaaatagaggcagttccttgaggcccagggttcatgctctaccatcccctctccaggcatgtcaatcaaccactttgcactggctcctcctttgtaatgggagtaacaataactgggggaaagaaattatttaatccaaatagaaggctccataaaggagggtgcactcagcctatactactctctcttggatgcctggcatgatgagaggcagttctatgggatccaaactggatgcgactttccttcaagactctcccttctacatggtagtgtaagtcaccattccagggaccttcatgcctcctgcattgttctagttgtctctctgttgctacgataaacactaagaccagaggtaactagaggaggaaagaccttatttcactcacacttccagatcataagctatcagtgatggaaggagggtcaggagctcaagcaggaaccttgaagcaggaaccatggaagaatgctatcactggctggctcattggctaatgatcagctagctttcttatatagctcaggaccacttgtccaggagtggtaatattagttcacagcgggttgagccctcccacatctgtcatcaatcaagatgatcactcacagatagacctcaggccaatctgatctggatagttctttaattgtaagttgcagtcaagttgatgataacaggatattgatttagtgatggggggaggagaaacatgtagtgatttcaaatgtgtagaattatgctcttcaaagtcttcctcatataagtctcccaaggcccacaatattctgaagctactaagtgacatttcatttaaaaaagtattccctgattaaataaatgtgatggatgctgagaaatttgaaccaaatctaggcttcaaaaggcagattcttcatttcaggttctgatgtggatgtgctctgcatcactgcagaaagcatagagcaatgtattttctaagctccactggccagtgagctgcttcttttcctcatcgacccataccctaggaatagcattctgttgaacacatctcagcaattccttgtcctaatctgtcaggtgtgaactttgacagacatgtggacttttggccagtatgtaagaacatatcatgttttcctatcatggaatgacccagtcacttctggaccatactttctggagggatacagaatgatgggagcatctttatttggctctgagttacagaagtcatcaccaatgggagtaagatgtcctctgaagcactgcacagactgtgaaacagtaactgagcttgtgtctggtaccatatcatagcgctcagtgagctagtcaccagttaccttgatcactgagtcaaagtggagtcatcccatagttttcttgtcaatggtgcctagcaacctgcgttgttttattcaagagggaagagtgacaaagcttccaggaaaatgtgagtctatccagggcaaagatgacttttgtaaaatgcttaaaagagaagcagacatatatacaaattgccaggtcattataataagccgaggaacatgtctgctggagcaagatgtaggagacaactcactgaacagtgaagcatgagcaaagcttccaccgcctgtgctaagatattagcagattctttctgtggcccgtgctctacagactcaagacagacacaggagttctgtttggcaatggctattcatacaatggtccttgctttgttgcttgtgtttctgttttctacagtaggtctctttgcacatactctcaaagaggacggggtaggctacttgatctgtgagctttcttgcaccctggttagactctttctatgctaaccatcaccacattactattattgtcacctgtttggaacatgagcttgctggatgcagggactaccatacagcagctgggctaatgccctgcatgattatagctattggtaacactcaatctttagtgtgtgtgtgtgtgggagggggggacgatgacaaaagaggctgcagatgcctatgagtgtctcagctcttttgctcagtccagaaaacaggcagaatggtggacactcagtctcaaattttactttttgaaacagaaagggtcataacccacacctctgtttgtcactgaatagtcacccatgtggttcaaacttaccctcctttcaaatccaagtatgattcttgtagatagcctagcttgtctgtgttgtcctgaactgctcatgaggctcaggggaggagtgtgctcacgagccaggctgaaagnnnnnnnnnnnnnnnnnnnnnnnnnnnnnnnnnnnnnnnnnnnnnnnnngctttgaaaaagaaaaagcatcagatatgtgtaaccaaagaggggataagtctagatatacacactggattaaatatatgtatattatatatacgcatatatgtgcatatatatattacacacacacacacacacacacacacatatatatatatatatatatatatatatatatatagagagagagagagagagagagagagctttattagtttgcatatgtgagaatcatcaagcaaagtcccaagtgattattgttaattttctaaatctggctgcaatgcaggaaaaaatgtgcatgctgcagcttgtattgcatcaaaccacatcctatagttatgtgacttttatatcaattgggggagattcatttttcctcactgtaatttatgagcctcttttcattggctggggatgcaatttgccaaatggatttcatccgatactttattttctccttatagctagttcttatgtaatttatttacagctcatgagtcttgatggatgggaagtaaaccagcacatactgttccaagttaaatggtcaggctgctgaggtgggggctgggtggggttggggtccctgcaactcattgttccctgagctgttgtttctgcccactgaggtggctgtccctattgaagatatgcagaggatccatttgaggttcatgtttcgacaccgctcatcactagaatgtgagtatgccatttatggtatgcccgctgtaccattaaagagagggggacagaatggctggctggcaggctggctcactcttagagattccatttcctttttcttctgaccttgcaatgctgtctctagctaaagataaaggagaaaagaactttgccatgtcctacgtgaaactcatgaaagaagatggaaccactctgcatgatggataccacgagttggtggttctcaaggtatgggggagtagagcctgcaaggggcagagctgtggtggcaggatggtcactagcagcaggcactctgaaatcatactcaccagagctcaccagcttcaacaaaatctgcacttgtctggacctctgtttccccttctttgagccctcagggaatccttatgaggaagtgatgagacagttgcttacaaacgggaaggtggggagcaaagacctttcttgggctttgtttcatttctgcttccagatacaaggtatcagtaatggaaggaggtgcaggaagtcaggcaggaatttggaagcaggaaccacagaagaatgctatcactggctggcttgttgacctatgttccgctagctttcttatatagctcacgtttacttacccaggaatgatagtgcccacagtaggcaatgctgtggaacagtggaaatgttattgttacaggagggaaggaactctgaactcttgtcaggaatatatagacacgtttgcaggatgctactctgtagccgttaccatttggggccccagaaccctgtggtccatttcacagcttcctaggtctcagtttcagttttcatttttctttcctccttttcatcttcatcatgggagatgggagaggacaactccaggaactgaatggaggtgtcatgtgaggaaaacactctgtcactgagttaaagtttcacaagcaacatggtctatgatattataacaaaatacctgaggtggcttacactgtagccaaagaggttggttacacatggaagacacagcgcctactttaagctctggtgagggcttcattgactgtgtcacaccattgctaagagattatgtgtgagaaagagaccacatcccatacaggaagtcagatttggtgtggccaagctcaggattttataacaatattttcttgagaggtagccaggatcgcagtgagagccaccttcattcctttcaaggccagtgccccagtggcccaagggtctccaaaagctcttgtgatttcaactccgcactggctagcagatgtccagcacatgagttttggaaactggactagttacttctctcactgttatgacaaaatacctggcaaaatgctgaagggnnnnnnnnnnnnnnnnnnnnnnnnnnnnnnnnnnnnnnnnnnnnnnnnnnnnnnnnnnnnnnnnnnnnnnnnnnnnnnnnnnnnnnnnnnnnnnnnnnnnnnnnnnnnnnnnnnnnnnnnnnnnnnnnnnnnnnnnnnnnnnnataatttcagagtaaaaaccatcatgaccatcatgaagataggaacttcaggcagctggtcacattacatcccagttatcaagcaggagataaccaccagttatcagagatccagatattgtcacatctaggttaggttttccaacctcaatcaatccaatccattatttattattttactatcttttgagacagggcttcactatggaatccccctggcctgcctgaaactccatctatagaccaggctgacctagaactcacaggcatctgcctgcctctgcctcctaagagctgggattagagatatatgccgtcacaggtgactgattaactaggacatggaactccctctgagccatgccctgaggcttttcttctaagagatcctagatcctgtcagggttagcagttggtcctgactgtcacattaaagctgcagcaagcatttacggcggtaggcatagaatctcactaagatggaggggacgtgtaagctctagagtggatacacacacacactctcttctgaggcgtacctccaagggcttgggctgttcacaaaatggtgtgatcttccctgcatgcttccctgctctcagaacaggagaatacaactgtcaggcgcaggctggaggcaaagcacaaagccatgaagtgggcatagctaagaggtcaacaagggctagagctccgtctcagatttctctgctttcaggctccacttgctccatcacacacattgaacatggccaccataaccatggcatgatacttttctctgagactctttgcctttctcaaaaagctcctctcttctacaacctctttcctcttgcttcacactggagtttttcttggctggcaagtctttcttccccaacagtctgggaacttcttggggccagaaaagcagcacgggctcattttccttttcccttaactgcatcaaacctcattctcctcattctcgtctgtgaactgaggatagcaggatatgttttaaatgattatgagccttaaaaagggtcaacggaggcagaaaagggacctggtatggtatagctcctgttccagagggaggacatagtaggcgtggtttcctagaatgcctactctgcttagaaactgtatggctctatttatgtataagaaagtgatccagagaggccaaagaataaatccaaggtgacatggacttgagaaggtccagacctatgtcctttgtcactaacccctagtttagaatggattccctgtattagtggatgggcatctacctttgcttttgtttcaaatttttaaggtggattctattatggtctgggagtttcaactctcttatagccctttaattcaggctacagagccacagcctttctggtaatgtgatttgcaggattcctacctgctttgtgggaaaacaagcctacctcatattgcttctctgattatttccttgctgtttctgaactttccacattacagtgtatgctattcaaccactacaagcgctgtgtggcattgcatatgtggtcttgccctggagcagtaaccaaagtgttgtttctagggagacagcaagaaaatggaagatgccagcgcttacctgacacttccttcttatcgacaccccgtggaaaacaagggagctacgctgagccggagctccagcagtgttgggggcctttctgtcagctcccgggatgtgttctccatttccacgctagtgtgctccacaaagctgacccagaatggtaatggaagcgttgagagctgggtctgtggtgctcatgcacgagagcatcaagcccagagtctgtggcgctcatgagcatcaagccctggggaggtaatggaagcattgagatatgggtctgtggtgctcatgtatgaggaagcattgagagcaaggtctgtggtactcatgcgtgaggaagcatcaagcccggggggagcccagtgtggatggtttagccagcgatgacaagtctctttctggattcttttcctagtgggtttgcttggcttgctgaagtggcgtatgaagccacaactgctccaggagaatctagagaagttgaagattgtggatggcgaggaagtagtgaaggttagtggggctttgcttggattcatccaccagtgtcagagctgtaacgggtgagacaaaattttgatggagtcggatgatttgacctctgatgacaacagaaggtcccgatccaccaagaggaatctctgttgggaaacctaggcaggcactgaacttcgggcatcaaaaccactggctgaatggggccctggaaataaaccgacttagatgtagatctcaactcttccactcccgttgcttcattgtcataatattatgactaagacacatttctcaggattgttatgagcctttgaagtgataacatttaaaaattgctcagcagtttcctatacataataataggtgagctacagcatatgagacatgggagagtcaatatatattaactaatattcttgctgttacacactgtcacacataatatagtaacagtctggtttcttaatattatatgcatattggtagaaacacacaaaaaatagtttgtgctgctgggaaagcatatattaaagatgagaaagacaccgggggcttacatcttaagtaaagcaaatagaaacaatgcaaatgccagaatctgcttcctcgtggtagcagagaatgtaatgtgtctgaacagcaggcctaattaaaccagctctcttctgcagcactaggaattgcaatgggtttcccagtggtcctagtgatggtgtttccattaagaacttggaatagctagaaagcagaggtcagacatctttgtatggccactgagcattgagggaccacgggaaatgtattaactccttccttggaaaggtagaaggagtcaagttttatttaattgcccaaacctggagaaacagtgacagaatttcctgatcagtatactttaactatacaccattgacctaatttagggatggcaagggaatcccccagatctgttgtctttgggctggagggggaagattacattgtcttcttgttttctagtattttcttctttaaaaaaaatttggttattgaattttgttattacatacatacagtattattgtatgttatattcatataatatacatacctatatacctattatgtatacatatacacatgcctttattctaggcatggagaactgccaagtgcactcaaagaattcttatacatgtgtaccatctagcttatggtaatgaaggtgccagagtattggttggtttgtggagggttcctcacacaccttcattagaggagccaccattatgctgaccaccatcatcactaattgggtggtggtgttattggtggtggtggtaggtgttgttgttattggtggtggtggtgggtggtgttgttattggtggtggtggtgggtggtgggtggtgttgttattggtggtggtggtgggtggtgttgttattggtggtggtggtgggtggtgttgttattggtggtagtggtgggtggtgttgttattggtggtggtggtggtggtgggtggtgttgttattggtggtggtggtgggtggtgttgttattggtggtggtggtgggtggtgttgttattggtggtggtggtgggtggtgttgttattggtggtggtggtgggtggtgttgttattggtggtggtggtggtggtgggtggtgttgttattggtggtggtggtggtggtggtggtggtgggtggtgttgttattgagtggtgagtggtagttatgttgtttttccttaccctaggagttcacaaatcagagtaactaaggatgggcatgtatgtcctgaattattttatttaatgcagtgtttgtagaggnnnnnnnnnnnnnnnnnnnntgtttgtagaggcttcctaattgatgcacatggaagtggcttgctcttctgtacagtgtagaatcctgtcatgggaaatgtcataatatgtgtatatgtgccactggtgtggaatcatatcattccaagtcctgtagctgattcgtgagacttctctgagcgccttgaacgtggctcagtgggtgtgttctcttggaaggacacacaaggatgagatttgtgggctatctgccctctttctgaatgcaaccgtcctttatccagttcctccaggacactctggatgccctcttcaacatcatgatggaacactctcagagtaacgagtatgacatcctcgtctttgatgctttggtaagagagtggggacaactgtttggcgacatcaggtttgaatgcttgtctcactgcaagaaaacataacatatggaccttatggttcttcccacgaatatggtgaggttttagaacctttggcaagcagactgagtagctgtttcggtgtttccagttcacttgagagtcaagacttggcaggtgacctgggtgggtgtgggggttaagtgtcattgtcagagttttgatgtctgattgactgtgcatgagaccgaggagtgttaaaccttggctttccatgattgccaggagctatctgaggcccggttataaagcacccagatgttcccctatctgtcttaccatctcttcttgatgccttataattaaccagggtcattttgctcctcacagtgaacttttcacagtggatctccatccagactcccacatggtctcactcttatttctctcttgcaactccaattttctccatgctatctgaaaagaattatgggaaccatctgggtctggaagtatagccctgtgttagaccatttagcagcatgtggagactcccatcactgtcaatcaatgaatacataatgcatttagtgtaatttagaggaaagaaagactgttaggattgtctaagaccagcaaactcttgatgcatgcagtacccctgtgtcatggatgtttgccttaaagaggatgcttgcagataactggctccctcaatcacaatttgggaaggtcccctagcatgctcgcctgacaggaaagttgtttcatgactaaaggtcctttgattaaattaccaaaggaagtgctgaatgttgcaagagcctcctggagattcataatgcacagaagcatagaactgactctggaagtcctgcaacaaagagagcagtctaacgacaacctgagatttctcttagttgaataggaaatccttttatcttctaataccccaaagcatactttttgaaatactctctccctttttttttttttttgttagagacaatgtattagtgaaaaggattaattattcattagcgagattaactctccggtgaaagaatagtgacaagggttccgttataccaggtgaacagtctctgggtaccctcccagagcaccccccaatcattctgactcttccgcagatctatataataggactcattgcagaccggaaattccagcattttaacaccgtattggaggcttacatccaacagcatttcagtgctaccttggcctacaagtaagtaactacgtgtacagatatttcctgtgcatctgtgattgtcctggtgagatatatgggatgcagggaattggcgcatttcccactgacactagtctagatgaacttttccttttctaatcatccaagcatggactgaatgactcacctatcctaaaaataaccagaaccccagagggcgggtgaatagtttactgtggcaaataaacaagtagtttattagatcattcagcaagtcagctgttgtttatcaagaagttacctgtgagcactagtgagcatgctcagaagctcagtgttgattggttgttggagaccctcagggtcaaagatggaaacccataggaaaatttggtggcagccagcttatgaagaaaccttgaaagatgggtcaagtattccaaagtctggcctactggtgatgaatagctatagaaagtttctaagcaaaggcgctccttgatacttaacaataacatgcctatatagaagaacttggaaaagacattattactctcattcttattcattcctgattatgcctagttttttcctcatcaaaagattatttttttcccctcactactttatcttcgctggctttttttatgggcaggaaatacttattcattccctgtaataaatatattttgaagcagttatttttgtgcttgcaaatgagtcgtgagctttgctgcgccgccacctttaacctttgattgaatgccttataatttctcgagcacactaattaccatgctgtggcttagaaagagatgtattgtgaaaatattatcccgtattcaggaaactgatgacggtgctgaagacttacttggatacctccagcaggggggagcagtgcgagcccatcctcagaacgctcaaagccttagaatacgtgttcaagttcattgttcggtcgaggacattattctcacagtgagtatttgtggtgcaagcatgatggatgattgattagactgcaatcaatataatacagcgcagtaatatttattttttactattggaggtttattttctcttattgaaaatagaagatttttttttaaaaaagaaattacaccaggattgaagatctagtttagtagtagagggtttgcagaccatctgtgtggccctgggctttatccttgttaccacaaacaagacaaaataaagacagacaggaaaaaattaaagctagattttgatttaaaaaaagaaaccttgaaaattcaaatctagtctagagatcatgaatatagaataattttattctctaagctcatttggtaaagacaaaaggcgtaataccacaggacagtgatatttcatccagtgaaatataccataggacagtgatatctcacccagtgaaatataccacataataccacaggacagtgatgtatgtgatttgagactattttgtttttttttaacattcttcatgtaagttaagattatttaaggaagatttctagaagtctgtgttcagtgttggagggactggcagggaagagtagaactcaagtggtttgccattaacgtggctcttgtaggttgtgatgttagatgaagtggtttctcaggctctgctgcctaccctggagatttgcacaacccacaagcatgattgtgtgtcagaaaaccttatgggacttaagatattcaaatgtaatatgtttatctaagtgtgtggtaaacttaggtagtgttgatcaaatgtgcattcaattagttgtgtgtgattggaactaagaaataaaatcttcaagggttatggtgtctagagcagcagtttgtggatcacaactcctcaaacaactctttcacaagggttgcctacaaccattggaaaacatagatacttacatagatattacagcagcaaaattacagtaaccaagtaggaagaaaaataattttatagctgggggggggggtttccaccacaacaggagaaattgtattaaaggattaaagcattatgctgctttagactcttattagcatcaatgaagactacgcaactgaaattgacttaaaagagaaacaagacttcattttagttcataatattgaaaagcccagggagtagatggggcacaggtgtggctgtgtccagatagtaagtgtcataggccacacccaccccatctagatctgggctctgctttcatttcactggtctcttctgagtcattttttttcagtgtcggggctacatattctatcagctgaagctgctcttgcttccttgttattccagcaaaactttatgccaagaacagttttaggtcatgtgctaacatcttaatcaggcatcgtagctgtgggactccgtgaactgtgtgtttgcactcttgtgtgccatgggtaaggccagttacttacagtacaggctttggcttaagagatgccttaccaaagacagccgaggtctccatctatcacctgatggtgatagcaggtggataccatgggtttcaaactcaacaaggtgtctcctttggaattttcctaaaacactgaaatttcaggtaaaatagagtgataccctaaacctgtacaccttagtttatttaaaaactgaaatatcagctctaaattctttagtttgccagctggttaaatcttgggtattattcttgcaagtttggatggtattgttttttgtttttatttttaaattagttgtgagccagctgtggattcctgtttttgtaagagttgactttcttggaattcaaggaatcacactttgaagttccagatacaagggttgggtcaggatttctcatctcttcttttgagagagaacatttggtctgtaagactagttcttaccctttgattcaccatctctccttctgttcttcctttggtattatcttcttttctctctccctctgtctctcttcatttccttcttgtccttttactttcagctttctcttccatgtcttgagcaaagtaaatttgcttattttcttttttctctacctctaagcacatcattttgtggaagttctaacccttcagggtgatttttggtacccagtggcttctggtttcttagggtatgggctggtatttcttgcctttcaagcatatgagatatcactaacacgggcaagaaatgatctctttacagcaacaaagaaataacctcaaatatttcctctgaattaaaatgcacaatgacatatggagcacctgcagcatcacaacaagagtggctggatactgtgtgtcctgctcactgcagaggctttggggatggtctgtttctcctgagtttgtaaggacatggagaggttgtgatactttcccataagcagggacatgccacttggaaactagaaagcagaatgtcagtgcttttgagttctaaagccatctggagaggaatcacataattattgctttgggggctcattgtgtctggtagtgtggtatccagatacttctttgttctctgtcccatgtgtataattgctgatctagctctcagtatttgttcccctgttatttttctttgttcgtactgcacatggacactcgagagggcgaggattctcctgtaccaacacccaggatgcaactggatatggacagaggagaagtagttgataagaggaatttttgtttacgatgtctggggaagatgattcctttctatctagagccaaagaagatgaattttgtgtagtcttctgttgctttagtatcgggggcaggtgtctctggctgcacacaatctgagccatagctataatgaaagctgggagaacaggtcctagcttctgtcacgtggaatcattgatcaaatctgaaaaatccctaaattgtggttcatatgtccttcagatcccaagtggccatacacatggctgatgtctaccaggcatttgtagattgattacctcctcaggcaggataaaccacaagtgaaaggcattcagaagcaatggaaggactattctctaaatattgacctgctttacagggtccctttcagcatctttaacactgaggctcaaatacccaactgtattgatctgtgagctatgtattgtttctgtattggtttctgacctatggctttctatggatttggaaataggatgcattccccgattctatgatggacattggccaggcactgatcagtgagtctgaagagcctaagagaggatagctctcaagagaaggagacctagaccctggagctgcaacagcttttgttcccattcatccttgctcctcacagatccaaatgttgttagaactcaggaggcggtaggtgtgacagtctagagcacagacttatgaatgtagacctagggaccatttctgtcactggaagcacatgcttgatgaagggacccagaacctcctagcttcagttttcctatctataagcaaagacccatattttagtgtttcaatgatgaaattgttcagaagaaatgtccctgtggcattccatggatgaggtacttggagaagtagcaaggatttggccatgctgtcaactaggagatgcagaaagtttagcttatgtggttagtttttgtcaacttgacccaatcttgagtcacttgggaagagagaacttcagttgaagaatttcctctgtcagattggcatgtgatcattttctgtgggggcatttttcttgattaatgattgaggtgggggacctagcccactgtgggcagaatcatcctcaagcaagtaggcctggacaatataggaaagcaagctgaacaaaccatggaaagtcttttatgcatacatatgcatacctaagaactttaagtgtttttatcttacacaaaacaatggtccctttcatagtgttgttttccttcttatactattggctagtcctcccatccactatataagatcatcttttctctttttctttcatttaaagcattctcctttaatgactcaagttttactactgagtcttcaggagctttcctgcaggttgcaatgttttatctttgaggacattgctcaaaaagtacctaatcttaacgcttactgcctttatcagagtttaccaaaatttttcctaccactgtttatgaagattttcctaccgctgttcaccaaaatttccctaccgctgtttaccaaaattttcttacctctgttcaccaaaatttcccaacctctgtttaacaaaattttcctacaactgtttaacaaagtattcctacccctgtttaccaaagttctcctaccgctgtttaccaaagttttcctagccctgtttaccaaaatttctcaaccgatgtttaccaaaatttccctagtgctgttactaaaatttccctaccgctgtttacaaaaatttccctactgctgtttaccaaaattttcctacagctgattactatggtttctttacctctgtttaccaaaattttcctactgctgtttagtaaggtttccttacaactgtttaataaaatttcctacctctgtttactaaggtttccctaactctgtttacctaaattttcctactgctgtttaccaaaaattttcctaccactgtttacaaagattttcctactgctgtttaccaaaatgtccttactactgtttaccaaaatatcccaacctctgtttatcaaaattttcctactactgtttaccaaagtttatttaccactttttatcaaagttttcctactgctgtttaccaaacttatcttactgctatttaccaaatttttcctaccacatattactgaactttttcgtaccacttcttatgaagtttttcttaccagtgtttacctaaatatccctaccatgtttaccaaaaattccctaccgttgtttaccaaaattttcttaaagctgttttccaaaatgttcctatcacggattaccaaaatttttcctagcactgtttacaaagattttcttaccgctctttaccaaaattttcctaccactgtttaacaatgttttcctactgctatttaccaaaatttccctaccgctgtttaccaaaattttcctaacactgtttacaaaaaatttcctaccacggattaccaaaatttttcctaccactgtttaagacgattgtcctacagctgttgaccaatattttcctactgccgtttatcaaaacttttcctaccgctgtttacaaaagtttgcctactgctgtttaccaaaaagttcctttcactgtttaacaaaatttccctactgatgtttaccaaaatattgctacgatggattaccaaaatttttcctaccactgtttacgaagagttttttacacctgtataccaaaattttcctacctccgttgaccaaaatttccctaagctgtttaccaaaatttatcctaccactgttaatgaagatttttctaccgttgtttaccaaaatttccctaccactgtttaccaaaattttcttacctttgtttatcaaaatttcccaacctctgtttaccaaaattttcctaccgctgtttaacaaagttgtcctaccactgtttaccaaaatttccctaagcggtttaccaaaatttatcctaccactgtttacgaagattttcctaccgttgtttaccagaatttccttaccactgtttaccaaaattttcttacctctgtttatcaaaatttccccacccctgtttaccaaggttttcttacctctgtttactaaaatttctacctgagtttactaaggtnnnnnnnnnnnnnnnnnnnnnnnnnnnnnnnnnnnnnnnnnnnnnnnnnnnnnnnnnnnnnnnnnnnnnnnnnnnnnnnnnnnnnnnnnnnnnnnnnnnnnnnnnnnnnnnnnnnnnnnnnnnnnnnnnnnnnnnnnnnnnnnnnnnnnnnnnnnnnnnnnnnnnnnnnnnnnnnnnnnnnnnnnnnnnnnnnnnnnnnnnnnnnnnnnnnnnnnnnnnnnnnnnnnnnnnnnnnnnnnnnnnnnnnnnnnnnnnnnnnnnnnnnnnnnnnnnnnnnnnnnnnnnnnnnnnnnnnnnnnnnnnnnnnnnnnnnnnnnnnnnnnnnnnnnnnnnnnnnnnnnnnnnnnnnnnnnnnnnnnnnnnnnnnnnnnnnnnnnnnnnnnnnnnnnnnnnnnnnnnnnnnnnnnnnnnnnnnnnnnnnnnnnnnnnnnnnnnnnnnnnnnnnnnnnnnnnnnnnnnnnnnnnnnnnnnnnnnnnnnnnnnnnnnnnnnnnnnnnnnnnnnnnnnnnnnnnnnnnnnnnnnnnnnnnnnnnnnnnnnnnnnnnnnnnnnnnnnnnnnnnnnnnnnnnnnnnnnnnnnnnnnnnnnnnnnnnnnnnnnnnnnnnnnnnnnnnnnnnnnnnnnnnnnnnnnnnnnnnnnnnnnnnnnnnnnnnnnnnnnnnnnnnnnnnnnnnnnnnnnnnnnnnnnnnnnnnnnnnnnnnnnnnnnnnnnnnnnnnnnnnnnnnnnnnnnnnnnnnnnnnnnnnnnnnnnnnnnnnnnnnnnnnnnnnnnnnnnnnnnnnnnnnnnnnnnnnnnnnnnnnnnnnnnnnnnnactgtttgccaaaatttaccctaccactttttaccaaaattttcctaactctgtttaccaaagttttcttcccgctgtttaccaaaatttctatattgcagtttaccaaaattttcacctgatttgactaaaatttttctaccactgtttaccaaaatttttcctactactgtttactaagattttcctaccgctgtttatgtaaatatccctactgctgtttaccaatatttccctaccactgtttaccaaatttccctaccgatgtttaccaaaattttcttaccgctgattactaagtgttctttacatctgtttaccaaaatttccctccgactgtttaccaaaatttttcctactgctgttaaacaagattttcctaccgctgtgtaccaaaatttcccaactgctgtttaccaaaatttccctaccgctgtttaccaaaattgtcctactgctgatacctagggtttctttacctctgtttaccaaaattttcctaccgctgttgaacaaagttgtcctaccactgtttaccaaaatttccctaagctgtttaccaaaatttatcctaccactgtttaagaagattttcctaccgttgtttaccaaaatttccctactactctttaccaaaattttcttacctctgtttatcaaaatttcccaacctctgtttaccaaaattttcctaccactgtttaacaaagttttcctaccactgtttacccaagtttccctaccacggtttactaaggttttcttacctctgtttactaaaatttctacctaggtttactaaggtttccttactactttttaccaaaacttcactaccgctgtttaccaaaatttttcctacccccatttacaaagtttttcctaccaatgtttaccaaaacttaccctaccactgtttaccaaaattttcctaactgtttaccaaagttttattcccgctgtttaccaaaatttttcctaccactgtttaccaaaatatccctaccgttgtttaccaaaatattcctaccgctgtttaccaaaattttcctaccatgaataaccaaaatttttcctaccactgtttacgaagattttcatacaactgtttatctaaatttgctaccgctttttactaaaacttccctaccgctgtttaccaaattttcaatacagctgtttaccaaaattttcctacagctgattactatggtttctttacctctttttaccaatatttccctaccgctgtttaggaagatttccttaactctgtttaccaaaattccctaccgctgtttactaaaagttccctaccactgtttactaagttttccttacccctgtttactaaaatttcctacctatgtttaactaaggtttgcttaagtctgtttaccaaaatttccctaccactgtttaccaaaacttttcctaccattgtttacgaagattttcctactgctgtttacagaaatttctctactgctgtttaccaaatttttcttactgctgtttaccaaaatatcccaaccttagcttaccacaattttcctaccgctatttaccaaagttgtcctaccacggaataacataatttttcctatcagtgcttatgaagattttcttaccgctgtttacctaaatatccctaccgatgtttaccaaaatttacctaccgtttattaccaaaattttcctacagctgtttaccaaaatattcctacaccatttaccaaaatttccctaccgctgtttaccaaaaagttcctttcactgtttaccaaaaattccctacagcttattaccaaaatattgctaccacggattaccaaaatttttcttaccactgtttacaaagagttttttacagctgtataccaaaaatttcctacctctgttgaccaaaatttccctaccactgtttaccaaatttccctaccgctgtttaccaagattttcttaccgctgattactaagtgttctttacatctgtttaccaaaatttccctcccactgtttaccaaaattttcctactgctgataactaaggtttctttaactctgtttaccaaaatttccctaccgtttattaccaaaaatttcctactgctgtttaccaaagttttcctatagctgtttaccaaaatattcctaccgctgtttaccaaaaagttcctttcactgtttaccaaaatttccctaccgctatttaccaaaatattgttaccacggattattaaaatttttcctagcactgtttatgaagagttttttttacagctgtataccaaaattgttctacctctgttgaacaaaatttttctaccactgtttaccaaaatttttcctactacagtttactaagattttcctaccactgtttatgtaaatatccctactgctgtttaccaaaatttccctatcaatgtttaccaaatttccctaccgatgtttaccaataattcttaccgctgattactgttttttatatctgtttaccaaaattttcttcccactgtttaccaaaatttttcctactgctgttaaacaagattttcctaccgctgtgtaccaaaatttcccaactgctgtttaccagaatttccgtaagctgtttaccaaaatttatcctaccactgtttatgaagattatcctactgttgtttatcaaaatttcccaacctctgtttaccaaaattttcctaccgctgtttaacaaagtttgcctaccactgtttacccaagtttccctaccgctgtttactaaggttttcttacctctgtttactaaaatttctacctctgtttactaaggtttccttacctctttttaccaaaacttcactaccgctgtttaccaaaatttttcctaccaccatttacaaagttttttctatcgatgtttaccaaaatttaccctaccattgtttaccaaaatttcctaactctgtttaccaaagtattcttcttgctgttttccaaaattttttctcctgctgtttaccaaaaagttcctaccactgtttaccaaaatatccctaccgttgtttaccaaaatttttctaccactttttaccaaaatttttcctactaatgtttactaagattttcctaccgctgtttatgtaaatatctctattgctatttaccaaaatttccctaccactgtttaccaaaatttcactaccgatgtttcccaaaattttcttaccgctgattactaagtgttctttaaatctgttcaccaaaattttccaaccacggtttactaaaatttttcctcctgctgttaaacaaaattttcctacaactgtgtaccaaaatttccgtaccactgtttaacaaaattttcctaatgctgtttaacaaagttgtccta

SEQ ID NO: 1406 - DNA, 2314 bp, Mus musculus
caggaggctctcaaggctccggtcttgccatggccccctggcgcaaaactgacaaggagcgtcacggagtggctatctacaacttccaaggcagtgaagcccagcatctcacgctacagattggcgatgtggtacgaatacaggagacctgtggagactggtacagagggtacctcataaagcataaactgtcacagggcattttccctacatcctttatccatctcaaggaagtgacagtggagaagagaaggaacatagagaacatcattcctgcagaaatccctctggcacaagaagtgacaaccacgctctgggagtggggaagcatctggaagcagctctatgtggccagcaaaaaggaacgcttcctccaagtgcagtccatgatgtacgacctgatggaatggcgctctcagctcctctcaggaacgctacccaaggatgagctgaaggaactgaagcagaaagtcacatcgaagatcgactatggcaacaaaatccttgagctcgatctcattgtcagagatgaagatggaaacatactggaccctgataagaccagcgtcatcagcttgttccatgctcacgaggaggcaacttacaaaatcacagagcgcatcaaagaagaaatgtcaaaagaccagccagattatggggtttattctcggatctcctcatcccccacccacagcctctacgtctttgtgagaaactttgtgtgccgaattggggaggatgctgagctcttcatgtctctctatgaccctcacaagcaaacggtcatcagtgagaactatctggtgcgatggggcagcaaaggattcccaaaggaaattgagatgctcaataacctgaaggtagtcttcacggatcttggaaataaagacctcaacagggataagattttcttgatctgtcaaatagtccgaattgggaagatggatcttaaggacattaatgccaagaagtgcacccaggggctgaggagaccttttggggtggcagttatggacatcaccgacatcatcaagggcaaggcagagagcgacgaagagaagcaacattttattccatttcacccggtctcagctgagaacgatttccttcacagccttctgggcaaagtcatagcttccaagggagacagtggagggcaaggcctttgggtgaccatgaagatgctggtgggggacatcattcagatccgtaaagactacccacacttggtggacaggaccactgtggtagcccgaaagctgggcttcccagagatcatcatgccaggggatgtcaggaacgacatctacatcactctcttacaaggtgactttgacaagtacaccaagaccacacagcggaacgtggaagtgatcatgtgtgtgtgcacagaggatggcaaagtgctacctaatgcaatttgtgtgggagcgggggataaggccatgaacgagtaccactcagtcgtctactaccaagtcaaacagccccgatggatggaaacagtcaaggtggctgtccctattgaagatatgcagaggatccatttgaggttcatgtttcgacaccgctcatcactagaatgtgagtatgccatttatgctaaagataaaggagaaaagaactttgccatgtcctacgtgaaactcatgaaagaagatggaaccactctgcatgatggataccacgagttggtggttctcaagggagacagcaagaaaatggaagatgccagcgcttacctgacacttccttcttatcgacaccccgtggaaaacaagggagctacgctgagccggagctccagcagtgttgggggcctttctgtcagctcccgggatgtgttctccatttccacgctagtgtgctccacaaagctgacccagaatgtgggtttgcttggcttgctgaagtggcgtatgaagccacaactgctccaggagaatctagagaagttgaagattgtggatggcgaggaagtagtgaagttcctccaggacactctggatgccctcttcaacatcatgatggaacactctcagagtaacgagtatgacatcctcgtctttgatgctttgatctatataataggactcattgcagaccggaaattccagcattttaacaccgtattggaggcttacatccaacagcatttcagtgctaccttggcctacaagaaactgatgacggtgctgaagacttacttggatacctccagcaggggggagcagtgcgagcccatcctcagaacgctcaaagccttagaatacgtgttcaagttcattgttcggtcgaggacattattctcaca

SEQ ID NO: 1407 - protein, 767 aa, Mus musculus
  VARIANT (1)...(767): Xaa = Any Amino Acid
GGSQGSGLAMAPWRKTDKERHGVAIYNFQGSEAQHLTLQIGDVVRIQETCGDWYRGYLIKHKLSQGIFPTSFIHLKEVTVEKRRNIENIIPAEIPLAQEVTTTLWEWGSIWKQLYVASKKERFLQVQSMMYDLMEWRSQLLSGTLPKDELKELKQKVTSKIDYGNKILDLIVRDEDGNILDPDKTSVISLFHAHEEATYKITERIKEEMSKDQPDYGVYSRISSSPTHSLYVFVRNFVCRIGEDAELFMSLYDPHKQTVISENYLVRWGSKGFPKEIEMLNNLKVVFTDLGNKDLNRDKIFLICQIVRIGKMDLKDINAKKCTQGLRRPFGVAVMDITDIIKGKAESDEEKQHFIPFHPVSAENDFLHSLLGKVIASKGDSGGQGLWVTMKMLVGDIIQIRKDYPHLVDRTTVVARKLGFPEIIMPGDVRNDIYITLLQGDFDKYTKTTQRNVEVIMCVCTEDGKVLPNAICVGAGDKAMNEYHSVVYYQVKQPRWMVKVAVPIEDMQRIHLRFMFRHRSSLECEYAIYAKDKGEKNFAMSYVKLMKEDGTTLHDGYHELVVLKGDSKKMEDASAYLTLPSYRHPVENKGATLSRSSSSVGGLSVSSRDVFSISTLVCSTKLTQNVGLLGLLKWRMKPQLLQENLEKLKIVDGEEVVKFLQDTLDALFNIMMEHSQSNEYDILVFDALIYIIGLIADRKFQHFNTVLEAYIQQHFSATLAYKKLMTVLKTYLDTSSRGEQCEPILRTLKALEYVFKFIVRSRTLFSX

SEQ ID NO: 1408 - DNA, 466380 bp, Homo sapiens
cacttactggccttgttactttcattcttgacctatagaatttgttttctaattgaaataattttttaaaaagattatattacctcctgcttaaaatcctctagtgacattgtcaatgccttccacctaaagaccaccagcaatgcacctgcagtaaaaaaaagttgggtttattgcttgtggctgcataccatggggagtcctggggtgttccagtaagagtatgttagaagggactttactatggataggtcttggacttgtgttatgtgatttggggtagtgtttaagaaggcagtgttaattctgtgattaggtaacttaatacatctcatctagaagaatggaagactagaatgaggctaagcctgaaactgattaaaaggaaaaatcagtagtcattcacgttagccatgacagaataatgacatctggtcatttttggtttggacaatgttcatgttttgtctatgatcactcatggttacagagttgtcttatttttgtctagattcgtcacagtcacaggctggcgctgcctgatgttgatgttcaacatgagaaattgttcatgttcaataggagaatatcacagcctacctgtaagggcctagccagcacctgactgtctttctcacttcccagtacacttatagtaaaattccaactctttagtgtgatcttcaaggttttatgtaatttggttcctatctaacttccaacctaaattttaccacatggtcactgcacacccatgacacaggccatttttggtttcttaaatacagtaagcttgttctcccattgggatctatacaaatgtgtttgcctctcccaggaacatgtttttcccaagggtcactttttaaaaaaatatttttacttaaattccgggatacatatgcagaaggtgcaggtttgttacataggtatacatgtgccgtggtggtttgctgcacctatcaacctgtcatctaggttttaagccctgtatgcattagctatttgtcctaatgctctccctccccttgccctccaccctaagacaggccccagtgtgtgatgttcccttccctgtggccatgtgttcccattgttcaactctcatttatgagtgagaacatgtggtgtttggttttctgttcctgcgttagttagctgagaatgatggcttccagcttcatctatgtacctgcaaaggatatgaactcattcttttttatgtctgcatagtattccatggtgtatatgtacgacattttctttatccagtctatcattgatgggcattttgtttggttccaagtgtttgctattgtaaatagtgctgcaataaacatacatgtgcatgtgtctttatagtagactgttttctattcctttgggtatgtacctagtaatgggattgctgggtcaaatggtatttctggttctagatccttgcgaggctgtgaagaaataggaacacttttacactgttggtgggagtgtaaattagttcaaccattgtggaagacagtctggtgattcctcaagggtcactttttaactattactttctcagacagcccttcccagaccatccccttttccactctcccacagtactctttatacaatttattttctttattaaaatgtattatgtacatggattttctgccttcccttctagcctacaggattgatgagagtggcaatcttgtttgtgttgttccccaagatatatcctcaggacttttcacatgatgagttctccatagacgtttgtggaatgaaggagcactcagcctctaggaatgggtggaagtccagtaaagccacaattacaacatggcatgcagatgtgtattggacttagagaagagatacacccagatgactggaggcttattgctagaacatgaaggcttatgaggaatctattgtctctttctaaaccagataattgatttctccaaaaaatcaagagattgagattattcaagaggcgctcttggctcaagtaatttgctttctgcagtaatgtctactatttatacttctgaaatgagaagacctaactgggttggtttgctatcacccaatacaaagcctccttattggccagaaactgttggcctttctcgtttgtaatacacccaccaaggtctcaactcagtgtctatggggactaggcaggtaacttaaatgaatgaagcaaactgggtttgttgttattatggcaacttaagaagaacttgttctatgtagacctacatctaagaatattcttcacatctgtaaatatatacaccctctcccatgtttcctgaaacatatatcttttcagtctctcttattttcccacttttgatagaacacagggccaagcagtatttcatttttgtttttatcttaagaaaaacaactgtgtaagcacaatggtaaatagccattgaaatttggcctcagcattggagattgtggcaactagagtgcatgttcaaactcaaggacagctgctgaagctgcctccagctgaaactgccttgtggaaatgcagtgtctacatttatttagagagagactagaaatctagaagttcaggtaaaatctcttgattgttaattgctggcaatttttaaaaacattaaaaactgtaaaataaaatatgcttgttaaacaaatatgtcaccctccagatttggcctttggactgctagtagttggcccctgtcaaatatcattgtttctagatgagtcagtgccaacgagatgtggaaaaggagcagtgctgatgtcactgcacccagtatgagccttggcagctttgcagaaagagccattgcgactactagacagaccagtagttcatgagcatgggctgccgcaggagggttgtctaactggagggggaattgggaggtggggggagtcaccaagtaaatcttcccagaactacttaacctagagggcaagaagaggtattcctattggaggaaggactacagcacacagagatctgagaattgtggcacttctaggaaacttcaaacagcaccatcttgtaagagtgtagggtgattgtgggtgtggtgcagggaggtggtgtaagaaggggcagaggaggcaggaaatgaagctgtcggggggaatgatggccctgcataatattcttaagacttttaaatagtgtgcaaaagtatttgaaggatgcactgaaagatattaatctgggccttgacgtcttagtctcacagttgaggtagatcccaccggcagatgcctacagcattaactagcagtgggcttgaggctattaacatttttaaatatatatacatatatatatactttatttccataggttattgggaaacaggtggtgtttggttacataaataagttctttagtggtgatttgtgaaattttggtgcacctatcacctgagcagtatacactgcaccctatttgtagtctttcatccctcaccctcttcccaccatttccccttgagtccattctgtcattcttatgccgttgcatcctatagcttagctcccatttatgagtgagaacatacaatgtttggttttccattcctgagttacttcacttagaatatacttatgatagaataatactcagccataaaaatgaatgaattagtgacattcgcagtgacctggatgaggctattaacattcatctgatagagcaaactctaggtaagcaggaaagctcttgattctccctatcgccaaccctcactcccacagtcacttctagagttttgtctgttactgaaggcagaattatttgaatgcctacttatctacatgccatctttgttgttgggcctccttcctttactgtaactaattgattttgggagcgtatatccttcttaccgagagtcttttatggtcctgatcggaatgtggactcctctttggtgagtaaaatttaggtaagtacaagcttttgctctcgactgtctgagctgctgagaatatactcggctatttgccatgactgtaacagctaacacaagaagagacaatgagaaaaatgttgactagtactgtggaggatggagtttccaaaggcagccatgtgatggacacaggtcagtgggacaccagaagcctctaggcatctacctactgacgtgccaatgctaactccgggtagccctctctcctatctgggcccaggagctctctggctgggtgttggtggacttgtgcagtagggggcccacccccatgaactactcagaacaagctgacaggcactgtagtgacgcaagaatgggaggagggcactcgaatgtcttgagatatagctatttagcaactgtatggaaatattccaatatttagtaatcattacaggcatactagtgaaatccagccaaatcttggacctgaatacatatgactctgaaaaagatggacatcagaaacctccccttctgctgtgccttagggaaagagttttcttcaatttacctaaaccatgagtccagttagatttctttgggctatacttgaggctttgcatagttatttcctgtggaatgtctttatttcacatttcacaaaagttgttaaacctctcacgttattacaaacctgctttgcttatatttttcctagattattccagaagcttgagaagaccaaaactacttgggcaaaggttctcagaagtaacatggagaagagattggaaggaggcaaggttggaggaagggatctctaatccaagtttcaaggaagatcttaagtttgtgggatggggaagagggcagattcaacagctgtttttgagattatcatttggaatgaaaggaagattaggatgagttaaatttctgacccgagtgaagtgaagggtaatgatgcactcatgggcaatcatagtggatattggctacaataagggatttcatttctctggcctcagtttgctgattagcaaattgggggtaaaattggggtaataatggtacctgtcttatggggctgcttttaggatgacacgagataatgcatgccaactgtttaaatcagggattgaaaggcagtaagtattcaatgaatggggctcagaaagtgttcagtgaatttgctgcaaaccacaaagctaggtaagtgatggagatggggttctagcacctgattaaagcacagtctggtcacttcatctgttaacattgggtagaaacagtcagaagagggacaagtctagggtacagttatgatatgagcttggttttgaaatatggagacattgatggggctgggaggggatgtctaggaggtagttggacacacaggactgaacttaacagaaatcttggctagagatgtccttttacccacagtcatccctcacaatgtatgtgaagttatagtcatcaagagtgtactacctaatagtcaagtaactgacagatggtgtttaataaaattgtgtgaccaagattattgtaaattctttaagtggttttagtcagatttttatgtttgactattgatctctcttgccaaaaaatttttatgatgccataggattgttaactgtaatgaaaagcccatatttcagaaacataaaagccatctcctaaccatatgaagtttaaagatttctgcactaaaagccaccccattaagaagttaattaaccctcagtcaaaatttctaaacttcatctccttcaactgaaagcagtttttcaactcttttaatatgctgaatttgtttgtttaacattatttaaggaagagattcctattataggttgtgtcacaagttgaatggggaaaaaaaaacttcagtgctcctcaagttcaatcttatttgctttctggcaccaccacctactcttggcctcccatcagatactttaccacactgttaatgtgaagttgcctgtttgtatgtcagaagcttaaacctaaatcgaaaaaaaaaaaaagtgtattttagatcacctggctacaagtttatgaagacaacacaactgtgtatagcagaagatagcaaactgtggttcacagatcaaatctggcttgttgcatgtttttgtatggcccatgaactaagactagtttttacatttttaaactgctgaaaaatatcaaaataaagataacattccatgctatatgaaaactgtaggaagtaaaaattccattttatgggaacacagccatgctcattcatttatgcatcatttatagttgttttcattctacaatggcagagttgactatttgcaacaaggactgtgtatggtgttttcaatgctacacagtgctctccagcaacccactaatcacgaggatgagattacaactccacagcatttaaagtgcatatctctctctatggtaacatttaaaaaaattaccagtgctatagccaccatgtcaaaaagaaaagaaagaatagtgggctccaaatgtcatgcttctaaggcacagtggagtgtgtattgtttgttaccaaattaaatagcactatggtttaaatgtgaccccccccaaagttcatgagttgggaatttaatccccaatacagcaacagtgttggaaggtggggcctaataagatgtaattagtagatcatgagggctctgcataaatagattaatgttgttatcgtaggagtgggttagttattgagggagtggttagttattgtgagagtgggtttgttataaaagtgagtttgggcttctcttgctctctggctcttgccctgtcaccttccaccacgggatggcacagcaaaaaaatgcccttgctggatgttggccccttgatatttaacttcccagcctccagaggtgtgagccaaataaatttctgttcatcataaattacacagtctgtagcattctgttatagcagcacaaaacaaacaaagcagaggagaaagcattgtgtttattacatgttgacactccaaacaatataatagattaagcactcatcacatcttttccaacttacacaaaagcaatgacaagaaaaattagaaaatttaaaacagaatatctcatcacagcacaatttctttaaaataataaaaagtgaaaatgagactacaaccagaataagtttccaagtggcttatttgttatgcaagcaaggcaaaatattttattgatgttaagttcattaaatcatgtttgattatagcagcagatgaaatatatccagtgaaaataaattagtttaagacttttagccttttggtgacactggttgcttggttgagaacattgacagaagcatcaatagtgaattttaaaatgacttctagtggttttccttagttcttgttgacaaatattaccaatacagctcagttgttgtttatttgagaagtcaatgctgagttcgaagtgaatgaagaaatagcttctatgaagagcctgtgtagaagaactataggcaagattactttaaaagaaaatgagaaaacactaattcaacacaacctgaagtggaatctgctaagatgtgttgctagtgttcatggtaaaaaaaatatctgtggagcagaagaaggcttttggagcaaatttagaaggtgggtgaaaatataagatatttaaagcttatgattattaattgtaatattcaccatcaggtactttgtggaaaatatctaaatctgtgatgttattgaatcagtggtatcaaaggttaattttattagcttttctggacttttaaccattgcccatttggtaaacatttttttcagaaatagaaaataaatatcctgtcagatcagcattaacatatgaatatttgaatcaatttcgataaggcacattaactttgaactccaataaggtgaaatgtgatatcattcccaaaatgtatttttttttgccttactaagctagtattacaaaaaatactcattcacatgatattttgaattttattaataaaaaaaatttagaaccttttttctttctttacataagtacctgcatcctacatatatacttgattttgctttctggactgcaaagactaaaatactatctgtgactttacagaaaatgtttggcatcctctattgtatagtcccaatttataacattgttgtgatagctagttttgtgagtcaacttggcaaggctatggcccagttattcaatcaaataccaatcttcacaatcttcacaggggttgctgtgaagtactttgtagatgtgattaacatctaccatacattgaatttaattaagggagattatcctcaatacatttggttggtgtgatccaattagttgacaaaccttatgaatagaactgaggttccttgaaaaagaagaaattcctcctgaggacatctgcctgtgagtttccaaactgctcttcctgacagccccacaatcgcattagccaatccccaatctctctctgtctctcatatacatatatatgtatgtgtatatatatatatatatatatgcatatatgtatgtgtatatatatatgcatatatgtatgtgtatatatatgcatatatgtatgtgtatatatatgcatatatgtatgtatgtatgtgtatatatatatgcatatatgtatgtatgtatatatatgtatgtatatatataaaatctcctactctggtcatctggtggaaccctaataccactgctgactgtataagacattattacctaatttgtgctgctagaaaacagaaaagaaaataactgcagataaaacaaaatcaataattttttgttgctccagttcagctgtgatattgcctaatctatcttaatgactctccagtgtaaggcagaaaggggtagtgagagtcatgaataaagaaagaaaactcagcaaaacttaaattcagccttatcactgtggatcagacttttttttttttttttggacagaatctgttctcagagcaaaaatgagatttttcgaggaaatgtctccattagcctaactctagggctcttttcctgggtcccactgttgctggctgtgacagcacccttcaccttgcagtgatgttggtaaatagtgtatttacgtattttcagagtagagcttctagagcttacatcagattttccaacgggtttgtagcaccaaaacgataaaaagctgtaaatgggccaggcacggtggctcacacctgtaatcccagcactttgggaggctgaggctggcggatcacctgaggtggggagttcgagaccagcatgaccaacatggagaaaccacgtttctactgaaaatgcaaagttagccgggcatgctggtgcatgcctgtaatcccagctactgggaaggctgagacaggagagtcgcttgaactcgggaggcggaggtcgcggtgagccgcgatcgcgtcgttgcactccagcctgggcagcaagagagaaactcgaaactccgtctcacaaaataaaaaaaaaaaggctgtaaaggatccacctccaggtaaacatttactcttccatgtcacctgctgtgtacattgtctctctaaccctcacaataatcatatgaagtaggtattagtatcccatttcacagatgagaaaactgaagcttagaaaaatgaagtcatttgtccccgtctggattcgaaccgagatctgacaccaaagctcatgctgaggggagttaaggaggtttgttcagtccctaggcacggcaatcaggaaactctctgcacttgcggtggtggtctggcgagccccaggtggggactggcctctgctccctcgcctggggaggagacaaagtgggagtggtccccaagttttgcgtgaagtggggtggggtggcgtgtcttagcctacggggcaccagccttctagtgtgcccctgcccaacgggagggaggagggagcggggagccccggcgagggaggagagggcgggccctgagaggagtttgaaaagaggaaggaagtggggccctgcggcgcccagccaccccctgacggcttccccacgggaggacgcgaggccccggcccagccatggccccctggcgcaaagctgacaaggagcggcacggcgtgggtaggtgcgggccccagggcgcggcagggagcgggacaggtggcgggagagccgcgagcaggaggatgctgcggggccggcggcgcggggtgggcagggcgcgctgcctgcaggtcagagggcgcagcctgcggcggggcctcggggcgggaaagccgaggctcggggagaggacggcgggaccccaccccgcaggctaagcacagccctcgccctctcgcctgctgagggaaccttagacatttccgagatagggtcaagacctgcgcttgacaactcagttcttcgcgccaaactcggcgtccccaggagtgccccagctcgccgcgtgggagacttggccttgtagagggagctccactctcccctggctcagccttggcctgcccaccatgcatacttccaccccctccaaagcgacacccatttgcctgcttcccctgtctgttcctcctgggtcagatgactcctgatttggcagggcatccagagggcagctcaagcttgggggaatggggctggacggtggggttctctactcagccccccagagcctctggggaaaaaggctcccgccaggtggtcttagggtaaccaagaagctagcttcgtcagcctcagccatctaaactcccagaagcctctgcctggagctcaggggcggaagtggtggctgggggaagggaggcctcaggtgctgctactctaagtgtcatccgtggtgcaatctccatggactcactgtggtttttaaacttaaatatcaaataaaaagtcactctggagcttcctacacaggcggataccagacaccatctcagagataaatatttcgcaggtgaggcattggaagacccaaacacccagagggatttgatgcagggggtccccaggccactgtttgggaaacactgccctggagagatcagcagttatccactcaattactgggtaccgggcactgtggggtcattttgatataaatggtccccatccagagaacaaataataattcatatctcaaggggcagttacaaagtaaggaaggatacagcttctgcccttgaggagttatgtgtaaggctagaggcttggactgggaagtcagaactgagttcaaatcagggtctgtttcctcgtctataaagtggaagtaataataatgcaggtctcatgagactcttgtgaggattgaatggggttatgcatggaaagcatttagtagtgtgctggctcaataagagttagtgattcaggtccagggtcttacctagcagcttcagaaccaagagacaccagcaccaagatgcaccctaatgccagattcaggacagtcatgccttatgagactgtagtatttcatggtttgcaagaccaaaggtcatgcaatctctgtctgacttcagaacccccatgtgaggcagtgtattattcccaacttacaggtgaagtaaccaagtttacatcacttggaagcaatggagcgggccttaaattcaattgtcttcagaccctaggccctttgcatggcaccagaaaagcatctagaaggggaacatcatgggtaaaggcagggaactggcatccctgaagtgtgtgggtcaaacaataagtagtctgttttggttttagtattgcttttagtgttaaaaaaatttcagaggtagattatggctagattgtgaagggctttgagtgccaaccttcaaagtttggatttccttctctgagcactggaggttttgagcagtgtcatctggaagaagttaaatagttaattaggataggagtggggaattggacttagaatagaaggaaaatgggtaacagttttacctgtctgctgactgcctggttaatctagcaggaggtcacttataatcaacattgcctgttaacctttactaggttaatccactctgcctgaggctcttgtcagtgaagagagctttctccttgcaggagagaggaaagggcagaaaagaaggaggtagaaagagaaactaacagtatcagttagggttaagtgtgacaaagggtgacagaaaacctccaaaattgtggcctaaccaagctgcaagtttatttctgtctctcatggaaagctcagaaatggtctgggaagaggtggtaaggtggctcattctatatctcacactgtatccttggcatgtgacttctgcctcctgagccacataggctgcttaagcttcggtgatcaggtccaccttccagccagcaaaaaggatgcagggaaaaagaaggtcatggcttttccctttaaagacattttcctgaaggcacacttgacatttcttcttacattacatcctattggcaaaaatgtaatcacatgactgactatagctgcaagggaagctaggaaatgtagtctgtaatgtaggcagccatgtacccagctaaaaattaggagttctcttcataagtaaggagaggaggaagaatattgaggatgatatattagtttgctcgggctgctgtagcaaaataccaccaactgggtggcttaaacaacagaaatgtattttctcacagttctcgaggctggaagtctaagatcaaagcaccaccagggttggcttgtctcatggcctatctccatggtttgcagatggctgtcttgctgcctcttcattgctttctgtgcaggcacacccttgctgtctcttcctcctgtcatgagaacaccggtcatattggattagcatcccaccctaaaggactcattttaacttaataattcctttatctccgaatatgcacttatctccaaataggagtaccttctgagacactgatgactgggacttcagcataagaattttggtggggacacaaattcatgacaaataatctgtggtctctggcatggtattttgggactataaagagggcttcaaggcaggagtcctgagataaagggtgagggtagaaaagagttttgtttaccctgaagctgagcctgccaggcagatttgtgtgggactctagttattcttgtaggggagggaaaagcttctttctgctactgcatcttgggttttctgtaaattagactaacaaaagactgatgaacaagagaaaacaaacaagtttattagcatgtacatcctgcttacatatggagtactcaaagggttggtttgaacttgagcttatacagcatcttagcaaaggtacaataaaggtttagagaagtagcaagtcaaaggagggttttaggcctccaagggcagcaaactgtgggaagggaaatatatggggaatctaatggaagataaagggttatttgtgcaggttcatcttggagccaactttctgtcttcttcattgccataaaacttccctgggagaggggatttatgacagtccttatttcttaggagtttcttcagataaatatccaggaaagcttcttgctgtacctgttgattcttatttgcatccagctcaaaataatcaatatgccctatggaagtggcatattttgatcagaaacctgttctgtatgcagcttctctctagctatggttttacacccatgtgtggtgttgaggaatatttgttggtttcttctgagggctgagggaaaatctgttccaggtgtctcccccagctgccagtggtttgctggcaatcctcggcattccttggcttacaaaagcgttgccttgatcgctgcctccaacttcacgtggtattctcattgtgtgcgtgtctgtctccgcatttctccttttaaaaaggacatccagtcatattagattagggcccaccctagtgacttcagttaaatgtgattacctctgtaaagactgtctccaaataagatcacattctgaggtactgggagttgagactccaacgtctctttttttggagggggagggcacaattcaaaccataacaggctctgcagaagcagagaagggatctttttcacagcttggttggggaatatggaggaatccataaccagctcgtggtccagggatgtgggtgatgctgtcgcagcccaggaccctggacagagctgatccatgcacactgacagatttggcgtgggcaatgtgtgctggtgtcatttgcacatggatttttgttgaagggaacaaaatctagtcaaaccagttcaacgaaaatgtgtgtggtgtgtatctgtgggagagcagggagaagtggtgtattttagggtcagaggaatcacatggaaatccaggaaacaggaggagccaggcctcggaaagggcttgaactgaggcaaccctggaaacctctgcctctcctctcatggcttctcagcttctctgagcatgccaactgtggtctcctttctctccccaccacctccctctgattgcattgttccttcgtaactgatactctaataccacagtggtggccccagcatgcaacccacccatctctgcacaaccttgcagttcaagcatccactgaatcttctctgtgtttatttgttcaaagtcccaacagaagagagtggtagcttgatttccctttgtaagaaagacaacccaagtcagagttcattgccagcctaataatgggcctcactctggtgagggtgctgcccctggcaggtctaattctctgtgactatgaggtggggtcacatggcttgctactcctctagcaggagccatgggtggggactgattctttgagttggaagcatgagtggaaactgcatcccaaacatacccaggagcagaacttcactacagagggaccaattatactgcttttattgccaaatgcaacagttgaaaggatagagagcatcactcactcattaacttgtccatttgttcactcattcattcttcattaacttcttaaatatttgttgggtgtgtgtgccaggcattatgctagtcactgagattactagaattaggccaatatggcccctatccttctggagcctgtagtctaatagggaagatgaaaaagaatttcatgaataaatcagtaaccatataattacaaattgtgatatgtgctgttttaatatgagtgagaatattaggaatggtcttgaattagatgatgtgagaaggcctctcaggagcaatggggaaaagaatcccaaagccaatgcttggagggatattaatacatgcatctttgctacagtggctgactgtacctttggattggtccccagaaattagtctggtgaaacaaaaatacatggattagacatctaattccttcctgccaccaattcttaggtgccggggcttcctactttcagatgcttcagcaatttgggtctgtttaggagtgcctgctgggctggctgtttgagttcatgtaaggagattgtcctaatccgtagttatatgggcacctcattaggcagtggacatcttgcccctgaccataatgtttgcatttgaatgagccttgaagacagattgtgttttctaagctctgcttcctcctgagatcagcatcctattgctgctgtcttttgagagatgaaatgtagtcaccatactgctccgctaatttctggacctttggatttgttttttttttcaatagtcaattacacatgggtgccacagtctgtgctctgcagcatatgttctgcaaatggggaatgacagtgcttatcaccacgcaactccagaggagtctgggcggagacaccacaaatgttccctttaataggcactttctcctttcttcccccttcccttaattggtgtgaattgaaaaacagtcaggctgagtttgtgagctgcttaagtcttattctgttgttagttctccttggagaaagtcattccttgtctccctgcaccccaccaggtcagcttctgctttggtttaaagtcatggtggcagaaactgaggctggagaaagtatgaccgccaatgtggacactttccagagccctctccgttcatcactctagggcagtggtctgcaaccttttcagcaccaggggctggtttggtggaagacaatttttccacagactgatggggaggtggggcggggcgggagggatggtttcgggatgaagctgttccacttcagatcatgaggcattaattagattctcataaggagcatacaacccagatccctcgcgtgtgcaggtcacaatagggttcctgctcctgtgagaatcgaatgcccctgctgatctgacaggaggcagagctcaggctaatgctggattgcctgctgctcacctcctgctctgcagcccggttcctaacaggccaccaaccagtaccggtcggtggcctggggagttggggacccctgttctagggcactcagttcccctgactgcacacggccccttggatcacagcctaagctaagatgatggttggagacataggtggacagtatgacgtgcacactgtcacggcacagggtctgaatggggtaataggcatttgtttggttgaattaaatggtgcaatgccaggcctagagacaccctgactgacatggtgggctgcagcagcagggccatcccagtgtcagctgaaccttgagggtttgcctggaaagtgggtttttgctgctggcttccctggcggtggcagtcagggaaggacccttctaagtagaacgaatagccaatataaagaggaggaagcctctctgatgtgtgggaggccagtgtggctgcagtagagtaagcaagatgcaaagcagtaaggaatggattctctgagagaggtcatagggagcagtgcctcgtaggtattgtgaggtccttggcttttactctgaatgggggagggggacattgcaggatttggagtagaattgtaggacgacctgtcttaagttttaagaggattgaacatagcagttttatggtgcattaatcagggggaattaaatgtggaaggagagggaccagttaggcagcaacagtgataactcaggccaagagatggcggtggcttgcagcaggagggagcagtggagacagtgagatatgcttagattcgggatgtatgtgttgtaggtcaagcaaatggggttttcctcttggaatggatgtgggtatgagaaggagagaggagccagtggtgactccgaggtttctggtctgaatagctagaagaatgagggctgcatcgaggccttccctagtgaaaaccttgatctaagtagtcatcgacattggcataaatcatgccattgccttaccttttgtaccacggtacttttttttttttttttaattttactgacagttctgggatacaagtgcagaacatgcaggtttgttacgtaggtatacatgtgccatggtggtttgctgcacctatcttcccgtcatctaggttttaagccccatatgcattagctatttgtcctaatgctctcccttccttgcaactcccccaccccctgacaggccccagtgtgtgatgtttctctccccgtggccatatgttctcattgttcaactcccacttatgagtgagaacaggcagtgtttggttttctgttcctgtgttagtttgctgagaatgatggcttccagctttatccctgtccctgcaaaggacatgatctcatttctttttatggctgcatagtattccatggtatatatgttgacattttctttatccaatctatcattgatgggcatttgggttggttccaagtgtttgttgttgtaaatagtgctgcaataaacatacgtgtgcatatgtctttatagtagaatgatttctattcctttgggtatatacctagtaatgggattgctgggccaaatggtatttctcgttctagatccttgaggaattgttttccacaatagttgaactaatttacattcccaccaacagtgtaaaagtattcttatttctccacagcctcaccagcatctatagtttcttgactttttagtaatcgccattctgactggcatgagatggtatctcattgtgcatttctcagatgatcagtggtgttgagcgttttttcatgtttgttggccacataaatgtcttctttctagaagtgtctgtttatatcctttgtccacattttgatggggttgtttgtttcttgtaaatttgtttaagtttcttatagattctggatattagccctttgtcagatgagtagattgcaaaaattttctcccattctgtaggttgcctgttcactttgatgatagtttcttttgctgtgcagaaactcttcagtttaattagatcccatttgttaattttggtttttgctgcaattgcttttggtgtttttgtcatgaagtctttgcccatgcatatgtcctgattggtattgcctaggttttcttctagggttttaaatttttatttatttatttttttgagacagagtctcactctgtctccctggctggagtgcagcggagcaatctcggctcactgcaagctccacctcctgggttcacgccattctcctgcctcagcctcccgagtagctgggactacacaggagcccaccaccacgcccggctaattttttgtatttttagtagagacggggtttcaccgtgttagccaggaaggtctcgatctcctgacctcatgatccgcccatctcagcctcccaaagtgctgggattacaggcatgagccaccacgcccagcctcttctagggtttttatggtttgggattttacatttaagtttgtaatccatcttgagttaattttcgtgtaagatataaggaaggggtccagtttcagttttccacatatggctggccagttttcccagcaccatttattaaataggagatccttattccattgcttctttttgtcaggtttgtcgaagatcaggtggttgtagatgcgtggtgttatttctgaggtctctgttctgttccattggtctatatatctgtttgagtaccagtcccatagcatggtacatttacaaagcccttgtgtcatcatgtttagccctcacagacaccctaagaaaaataacttctgtcttcattttgcaggtgaggaaactgaggcatagatctttgaggtctctctgaaaattccctctattttatggaagttgccccttttcaccttgtcttttagttaggtaactgcatgtcatcttccccactagctggtacattgttggagggcagagctgtatggagggttaactttgagtccattcagcatcactgcaatagcaggaacgtggtaggtcagagaaactaatcattattgtagcataggtcccattgagaatcctgtgaccgctagaaacacacttcttcccattaaaatatgcacatgtgcagttctgcattgtaatgtcgccaaaactcattcatggaagccagttaaggtccctggcaaaatgtgcttattttactctgtaactatttagtaaacaaatacaataggtatagccaaagcattctgcctaaggtttgaattcttgaagccaggagcttgtcaagagtcggaaaacaattcttacagtctgttcagatcaattaagttcagtaagcctgtcctgagtgatggtccttagctgggtgtttgggcccagagatgaataaaacagttcgggaagcttacagtccagtcataacctctctttctgtatgaggcagcagagagcaccattattagtactaatgtccccattggacaggttgggggcagtgccccctttgcttcatgttactagagctgccatcatccccttcatacttccttgcagcctcatgttgaatgatctgggcacctctgtagaatgcaagctctatgatggcagggccatgtctgttgttcttcttcagcacagagcaggtgctcagcggctgctgattggatggatgaagaggtggattcataggtggatggatagttgttgattagatggatgggtgggtagatggatgatagatgggtgagtggatgcatggatgggtgggtgggtagatgagtggagggggaggaggatgggtaaagggtaagagttggaggttttaaaattttctggtggccttataggattcagatggactgagttgccccatcttgcctttatcttcccacctcatccatttccctgtcaggaggcgaggtcctgtgagagcacagcacagcaataaatagagtactcttgaactcgtctccaaacagtggactcctgcagatggtcactctaccaagctcaccagttctccctgggactccattaagatggccctgccattcatccctcacacatcaagctggtttcccccctctcttccctgctgtcacaccctctccccacctccttgggggctctcagtccagttcttccccttgccagtctctgcccctccctctccctccagtctcacttccttagtggggcctctttttccctctgagagtccacagctgctgtgacttgcagtttagcctttcacttctgaagacagctctttgtttcttgtgtgtttattttgtctcttcgactagatttcacagaagctcaggagagcaggagccaccccctttcaccccacttttctagctgcaggatcctgcagagtgccagacgctctctgcatttggggctggagggctgatttgattgatttcaccataaactctcttccaactctgtagtgtgtgtgtgcatgtgtgagtgcaagagtgtgtgagaatgtgtgtgtgaatgtgcctataggagtactagaatggagagagtgaaatccagcatgatgtttcagagcagggtttatcaaccttgtcactattgacattgtgggccaggaaaatctttgttatggggctgtcctgtgcactgtaggatgtttagcagcatctctggcctctagtcactagaggctagtagcactgacacccccgactcccctcccccaggttgggacaagaaaaatgtctccagacatcaacaaatgtctcttctagtggggcaaattcgctcccagttgagatcactgtttgagagaattcactggaatcctaactttcgtcttgtcggctgggcatgtcactggctcgctaaaaactgtgcgctacaatatgcagcccataaggttgttatcatgatccagcaagaggcctaaagcacctggcacagtgctgggaccaaatgcatctccactcgtgagaggcgatgtgagtgtggtgcatggctgagagagtgtgctccggagccagcctgtctggggtgaaatcctcacttggccccttctttgctgtgttcaccccaggatgtttacttgatcttgcactacctcagtttcctcatctgtaaaacagagacgataataatcacacccaccccaagaactgcagattcacgatgaaatgggtggctgtgcgtaaagcccttggaatagtgtctggtatgcaggaagtgtttggcagaggttagctgttcttctgctctctgctctctcctggtgggtggaggaacacctcctccttctaggttccctctggctgtaattcttctgcctcatttgctgctgactagcgcccgcccgggtttgagctctggggtggctgccagaggcttctgctgggtcatcgcagtcaccctcgtggatgcaatgtcaggatgctgcctcagtgcggaggctgtcaacacctgtccagagacttcaggcacactgcttacgcatttcgatgagcgcatttcacttgaatccaccaaagtggacctgctgctagttctatttccccctggagtggagactctccaaagtgagcttcgggcaattacattctttctccattattgcttttgttcctcttacacagccacttgtccaaactctattaacacttggtgttggctgaagcttgtgttttcaaacatgtcagcagatggcagggccccagatgaggtacgaatccatcttgaagggtcacagggcactcgatggctgcaatcaaaattggcagccaagacgtgtcttttgaagcaatcttgataaatgcaagaaagaatatagccagaagaagggacatagctgcccttcatgttcattcacatcccttccgtccaatgagcatttcttaaaagttcaataaacattgattgcacttctactgtgggccaggcgctaggaattcagtggtcaacaagataggctcagtctccatccttactgaggctggatgtaacgaggatataaacaagcccagtgtatgtgtaatagagtgtgatgcctggtgaggaagcagggactctggactccactctaggtttgaatccgctttctgccactttctgtgtggctatgagcaagttccttaacatctctttgagtttcttgtatgttacaggaagagtaataacttgaggttactatgaagattaaatgggctgatacaagtaaagtgctagggatttttttttctttctttttttttttgccggcgtcttgctctgtcacctgggctggagtgcagtggtgtaatctcggctgactgcaacctctgcctcccaggttcaagcaattctcctgcctcagtcccccgagtagctgggactacaggtgtaccccaccacacttggttaatttttgtatttttagtacagtcggggtttcaccatgttggccaggctggtctcaaactcctgacctcaagtgatccacctgcctcccctagtgttgggattacaggcgtgagccgccgcacctggcagtgctggggattttgtctgtcttatctatcactgtgactatagtactcagagcaatatctagcacccagtaggtactacatactgtgtctacagtagttaggacagtatctagcacacactagatgttcacatggatatctgttgaaaacaccatggagtatatacttggcatttaaaatgtgctctaaatatttaccattttcttaggaaacagggtgtgcagtagttagaatttagactccgagatctatctatatatcttattaggtggagaagttgtttacccaccccttcctcagtttccttatatataaatcaaagagaaacattgaacttatctcctaaaattgcacaaagcacagagacccttctttagttgtttttgtgagccactgagctagaacaatggtgtttactttcaccttagctccctctatttgaactcctgatgaatagagtacttcaatatgtttaggtggaattggtagctaatcagtggattcgatttccagggttgctagaagttccatctgcctcaaaatagcagtccggtggcttgccaacctgggatttccaatgtgagtccttgctggagtcagtgacccaagatggctccatacttgggaacatccctttgatccttggccataaatgctttgttctgggtgggcttgtcaggataccagtttctgttttggttcctatgtatggtgctttggtacaaggagaggtcaagtctttcctagggaatgtgtcagtattccccagggcttggcgacctggcacgatggggaagctggaatgagtatttgcgggaatggccgagggcctgagggctgtgggtaggcttccctgatttgtctatcttttgtggacaggcactgggcagggtggagcaggctatgatttcttcctcttgtttttctgcctttttcatcccttgttcaaaagttgagagtggttaggcccatcttagactggtcagaagcaaactgaaggacagagataagccatcaaacgtagcagaggggaattctggcttggagcttcctgttagtcatctagaagactaaacagaattgggtattcataggcaaagccacttcctttgtcagtcatgtctgcttttcttcaaatggagccttaagaggcccttatgcaaaggcagaaatagatttataaattaagtgccaaagtcagttactttcatttttgtaatcagtgagtacttggaatgaatacggatcttcactttgaatacccagtttcaagatctgtccaggacatcttaagccaatctactggcaccttctcacctgacattgctgggcagaggatgagggaagattcccgaggaaagcagggaggagctggtcacggagtaacacacggtcctgccccacctccacatatctgatggacacccctgatttgctcgtgctccagagactaacacacattgtgcctggttttcttctgttggaagcctcagttgcttccaccatcctgtccagttctactgccaagtcctcaggcagaccacttgggctgaaagagcagggagcagagtctacccagtgaggacaccagcaaactggagtatgtccaagcaacagcagcctatgaggggaagggggttgaaatcaggccaagtgcggagggaatgaagaaacaggctgcgtttatgcaggaggagagaagcctcagcatcccccgagggccctctctagatttgcttttggacaaaggattaatttgattaagtgttggtcgacagagcagttggttgcaaagtgcaggaaaggagatttaaaggctacacaaagctctgaaggagtgagccttgttcaggagataatataatgctaataaaaagaaaagtgactacatttactgagcacttactatagctggacattaagtcaagtcgtgtatgggcattaatttcagctgagcctcccaggaacccagtaaggtagggaccattatttcttgcattctacagtcagaggaactgaggcttagggagattcagccacttgctcaagcaggctgcccctggctcctacagtgcctttgtgtggattacaaaaagatatccttcctctggtgggcacagtgccagggcagggtgcaagccttggcaagcagatcacaggttgggtgccagccttcactgctctcttggctgggtggccttgtgcagggcacagcctgggcagttgtacactgcagccctaggcttgaggccagagccaggaaaagacagaactggcctcaaaagccacatctgtctgactccagagacaactagctcttaactcctaagctttatcatctctcaggatggagacttcatctctctgaatgcacacaaaagggaggttagggatatggggcacacctgggagtagaggggacagcctgtgctccgttccactgaagcatcctaaaaaccctgcgagataggtactgttaacatccccattgtaagaaagtgaggcagagaggtgaagtcacttgcccaagatcacacagtagtgagtggcagagctggggttccttctgaaccactctggtcttttaatgtggtttaggcagacgtgttggggtgattggaccaggggaaggaggaaggagggaagagagagggaaggaagggaaggagataagtgggaagaggcagagatgaatgagagttagagactggcggtggtctctgtgatgcaaaagaatctgcacagaacccagtggcatttcacccagcttctgcataggggttagacacagagcagcattggctatttagaccctggtcacttaatggatcagcctacggtccgtatcctcaaaggtaaaaggaggtaattatgaagaggtgtacctgtagagtagaggagtaggaaagagcatgggcctgtactcccagttccagcattgtatgaccttgggcaaggcaagtaacctctctctgtctgagtttctgtatctgaaatttggaaataataagacttctcacttgcaaggagtgttgtgagaattaaaggagtaaatgcacatggagaacttagaatcatgtctgggatataagtgattgctacacattcgttcttattaggatccacactgataagccacttccagaaaagtggggcctgcctacgtttagttcctctttaggaataataacctttttacagtggtatcttcttatcttagctccccacccaacattgtggggtgggtaagagtggcacaataatgcctactttaaaagtggggaaacggattcagagggaaagtgagtctgttttgtagctgtcaccagctagagcgggtttggaggagtctggagacgtagctactgcctgttgtgtgggcagcagcagggccaagggcgtcatgaaggactggagctcacaccggggccttcctcctggtaaatctcctacacaggttccttcccttgcgtagccctctccattgtcccaatggtgctgtgctggtcggggaggagcatgggcccagctcagctggccctgcctgcaggaagcctcctgtggcccccatgcatggctccagcatgttatctcctgtgctctcaaagcacctgtacctcctgagcccagaccatccatcaggtcattgcaggtggacctgtcagcttctcccattagaatacaaggccctggctgtctaattctaccatttggttactggttatggagcattacaacatggcaggctcttcacacactgggactgtctttctttctcataataatttgccatagatccctggggtgcctgagctgggactcaaccccaggcctggctgaaggaggggctcagggtctcagaggccacagctgcctggctctcctgctatcctgctcaccagtgcatctctcctacctggtatagcacctcaccacacttcaggtgcttagtatgcagttgtttctttttaattgtagcaaaacatgcataacaaatgatgtaacattttaactgcctggtgtacagtaagaggacagtccatagtaaatagcagcctccttgtcactcaggctcaatgcagggcctgtgttgaggaaaggtcaactttggttaatagaaggtcttgggagccaggctgagtctgaaataactcttgtggcaggcaataggtttctgtgttggttttgtttagcccaggtgggctgcgtgggcatgggatggacttgaggcagggaaagcaggaaggagcagagactaatgagatctagaggtctcacctagctgtctttctttctgtttcacagccatatacaacttccaaggcagcggagccccccagctctccctgcagatcggcgatgtggtgcgaatacaggagacgtgtggaggtgagtcactggcccacgccccaagtgctggacccttggctgatggaagcctatagtacacccaggcccctcagcgctgtctctgaacctgcaactgtgtggtctatttaaaaacgttttggtaacgctagtaattagaatttactaaacagaaatgctttctcattttaggaatgtatgtttcatagcaaaagcctaactgggtggttcgatgtttgttatgctctccatttgcttcagccatggggctattcagcctgtgactcttcctagatacagttctttattagtattaatatcacgataaagggaaataagcatcattagggtttggaagggtcccataaatcacacctctaattccaggagagccgatgtgcacagttgtgttgtttgtttactgcatgaaggcacccagcccagggagcaggagctcactcccctccccaagctgggagccctgtcttgggcaatgtggtggcatctctttctttctcctacaaagatgccattgccttgtgaagccaggtgtctactgggctgcgtccacccatggtggtgtgcttgtagggagtgctttttaaaatttgcacaaagatgaatggccttggactcataagtcaggcagttggaaatcaacatgtcattgataaacttgatattgggagcatggcttgggcatgagaaccaaatgagctgctgatctgttacctgcagtcaggcaggctcccacccctcactggcccaactggcctaccacagttccctcctacctgggcctgctgatacctcctgctgcatggagggcacagagcctgggcttcctgtgtctcggcagagtggtagaggaagaagagagagtgtattgagcacataggcctgttctgcccccagtgaatccattagaggaggccctggggagggagtgacggtcagggaggaggcaggtgtgccactgtgaaggagtcctttcatggggaaaggcggtcacctgcaggaatagccatctttggtcctttccacaaaatagacactgtgctaagttctttataacacatgatcctagtcactcctcaccacaacccacaggacaggcagtgtcatttccagtgctggattagctacatgcaacctcttaggcaacagagcccctagctgggtctgcagatttgtacaaggatgcttgtgtaaacacatacacacacacagacacacacaaagacacacacaaacatacatatgtacatatatacacatatgcatacctgtgcatgtagatacaaccaaaaaacatacagaaaaccattttgtgggcaaataatttgaaatttgatatgtcaagacaactttaaaaggggtcatgggggaaatgagaactttgttcatcttccttatatttattttatgctttagtattatttttacttggggttgtagatgaggggataccgtacacttttcagtgtccagggcctgcaaagttcacactccggccctgttgaaaccttttacgcaaggagtggacaaggctggaggagaggggtggagacgctgtcctagagaattgaattgggtctgtgattccacgcacgctgccccctgctcacagcataaccctatcttttacaaatctagttctgcccagtggcagataagcaaactgtaggtgactaccaaaggcaaagaatgaaaataaaaacagcagcaactctcctcagtgcctctttcatgctactggatgctaatcctgagaaacaggcacgagacctcacatttgcagatgaggaaatggaggcagtgaaatgactcatctaaggttgcacagtgagctagtggatttttttttttttttttaagacggactcttgcttttgtctcccaagctggagtgcagtgatgcgatctcggctcactgcagcctccgcctcccagattcaactgattcttgcgcctcagcctcattcgtagctgggattaccagcatgtgccaccacgcctgtattttcaatagagacggggtttcgccatgttggccaggctggtctcaaacacctggccctaggtgattcgtgcacctcggcctcccaaagtgctgggatgacaggggtgagccaccgcacctggccccagtggctcttttctgatagccaagcccacactctttcctccacccatgcctgccaaaacaatgacaaggccttggtcattattttctgtgtcctacattgtgaaatccagatgagtatttttctcttcgttgtatgcagtttccctgaatagaaagcttgagggaataaacctcccacacaggctgccatagtcagagccttgccagtacctttccctggcctggtgccctgacctttacgaaggctactctggtggactcaagccacctttattcatctctgggacacctttatcctttctttggttctggttttccatttctaattcaattagtcttattttaatgtatctttgtaaattagtcacaataacttgctggaaaaagctggatatattcattggtaaatggctaataatttattaattatttgaaaagacagtgtttggaagtctgctagaatgattctagctatctgaggaaatatcatatctcctggtacgcaaatcattaggacttctcatgcatacactcatggccatgcagagttttcaaataggggatccaaagtcttcttggggtgccttgagtggcagaaggtaatggagctggagggggtctgagagcaggtctggtgttgtctgccttcagatggggtgtatggtctgtgattctgattgaaaaaaaaagattcctctaaaaatataaaaggtgtgaaaaccacaatgttagtcaaaaattagtcaaaactgtgtagtagaaagaatatgggtgtacccgtgaaaccttcttacagaaaactacttcaaaaccaaaatccagccaactgagaggtgaatcacaatacaagaatattggattaaaaatctgtgataaaaggaaatagtggctaatattgggtccaaatgaatcgatttataaaaattgatattaaaaacagtaggaatttcttgtagaagggacaaacataaaaaagcagtgtgatttttttcctccaaccacttccttcagtcatatttggttgacatctttcctgagatttggtggcatcagaagactttatttaatcttatatccatgtgctgctcacccacttcttccctttcacccattcaaacaagacctggggaaggagtgagtttgggatgttttctttcctattctttgtcttctctactgaaataagcctaatgattggccagtccactgtacaaatagtcatgtagttgaggaatgaaatgccagatgcccctgacatcatgatttttatggctaccataaagaatgttattgttgggaacctagacaatattttaaaaaatctaataaagttgagacttgggaggagaatggaagataatagctaactcaatgacatcactttcacaacaaagtcaatgaatattaattggaaataaaacatggaattaaaaaaaataaccacgtctatctttgaatgcttttcataacaattttcattttagagaagttttcaggaaatctttttagtgataaagaaacattgaatcaaagttcaaatgtccctcaatttcacttggtttctttttcttctgctaaatacaaataagattaaataaaatttttatttatatcccagcactttgggaggcagaggcgggtggatcatgaggtcaggagatcgagaccctcctggctaacatggtgaaaccccatctctactaaaaatacaaaaaattagccgggcgtggtggcaggtgcctgtagtcccagctactcaggaggctgaggcaggagaattgcgtgaacctgggaggcggagcttgcagtaagccaagatcgcaccactgcactccagcctgggagacagagcaagcctccgtctcaaaaaaaaaaaaaaaaaaaaaatgtatttatatagtatcttcaccatatgctcatttttatgagagtattttaaaaaccatattttatctttttatctctctgtcattctatgtatataaatataaacgaagagttgactggaatgatattaatagtgtttttctgtgtaatgggattcaggataattctttaagcttatatgtttgtacttttctgtttagtttaaattctttataatagcatatattagttttaaacaaacaaaaaaaaatacagtctttaagttgggcatgatggtgtgtacctatagtcctagctacctgggaggctgaggcaggaggatcccttgagcccaggagtttaagactaacaagactccatctctgaaaaataaggcaaaaaaagtatgaagaataaaataacaatcacttacattccaaccacctataattaatcattgccaacacctgaggatatttgcttccaatctacaagactgcattattattattattattattattattattattattattattattattattattgagatgggggtttctctttgttgcccagtctggtctccaactccagggcccaagcagtcctcctgcctcagccttccaagtacctgggattacagatgcatgccaccttgccgggctttcaatagttttaaaatcttccccaccacccccaataaagaagtgaaaagagcactggcttttgaattagaaagttattccctgcttctgctacccactagtggagtcatcttgggtatgtaagctttaggtttctcatctgttaagtgggttgttttcaccttgctcctgagcttcttatggggataaaatgagaaaaagtaaagaagctgtctaccaccagcctggctcatagaaggttctctgtgtttgttaattccatcctctcccctattatgtagtgctgtactgaaactggcagatgtatatttttacaacatggcccagaagctgaatcttttcctggaatgggtgagactagcccttccttgcctatgtactaaatttactcagctgaatgaagagggaaaacaggaccctaaactggaagcttaaacaagggtgaatttcactttttattataaggataatatattgttatgataaaaactcacatagttcaagatggtactcatgctaggccatgctaagccttagacatcaaatgctgacttcattgcccatattatatctctcatgctgcctcttttatccagaggcggcataaacattctgtgttttagatgtggaaaacacaggtaagtgtattgagcagtaggaattcatcatagaagggacaaacacaaaaaaaagcagtgttattttatttccccccagtcacttcctccagtcatatttgattgacatctttcctgatatttgatgacatcagaagacttcaatctcatatattgtgcagctcacctacttcttctgtttccccagtttgaacaagacctggggaaggagggagtttggggtgctttctttccagttctttgtcttctctactgaaataagccctctatgatcagcttgtccattgtagaaatagccaggtagctggggaatgagatgccagatgcccctgacatctttgtgtgaagctcctggaatgcactcatactgtgtttggatgtagttttggggtggaggaactgtatcatgccctcctaaggcaacaacttcctacctccaaaggctgacgtgagagaattgcttgagcccaggagttcgaggctgcagtgaggcatgatcatgccactgcactccagactcagaggcagagtgagatcttctctctaaaaataaataaataaacaaacaaataaaatcagaggaatgagggaggagatggatagagcatcctctgctttgaaaaaatagcgcattgcttttgttgttgctgttttctagaaatgcaactacatactctatgtactattctgagaccttctgttctcatttgaaaatattggagtgctttctaagtgaacacatatctattaccacattgttggtttggctgcaaaagcttggcacaaggagattttgaatgtacccctcactgaggagggcacaccaagagccataggcagtggcttccatgctaataactcctttgagggtgatcttgacctatccaaattctttgcttttaatataagtgaggacattataagcacttaacatggaatctttttaaagcaccaccttgcaaggtgatagtcttttgttcaggtctgctgtagtgacaggtcactttgaaaaggactccattttcttcagtaaggctgctccattatcagcagtgtgtatgtgaagttttcctcccttctgagtgaggatgaggctcagacgtcagtaaacttccattatgtttcatttgcggcatgtctatttgctttgttgtgatggaaatatgttgaaatgactttagtgcaaaaaaaaaatgatattataaatccataggtcctgaaaataaaatagaaaatatgcccaactttctctgcattattattattttaattgatttttttagaagaatggtatctactaactcttttggacactggacaaactctctgagtttttaatccaatttaagcctgataagacactattattattcccatgagatgtgaggcactattattctcattttatagatgaggggactgaggctcagaagaaagtattaacaggtccatgattgcacagttaagtagcagatctccaacaaattcagactttcattgcagagctcatactctttaaaaatttttttaattgtatatgtttaaggtatacaacatgatgttatgagatacataataggtagtaaggtagtaagatagttacgatagtgaaacaaatgaccatatccatcatctcacatagttacccttcttttttgtttttgttttggtggcatcagcagctaaaatctaatcatttagcagaaagctcaaatacagtacaattttattgactatagatcccttgttgtacattagatctctagacttgttcttcctacatatctgttaccctgtaacctctaacctacgtttccccatttcattcctcccatcccctaccctccctggtaacccctgtttcattctctatgtctgtatatttgactcttttttttgttccatatataagtgaaataatgcaatactttctgtgtctgtcatatttcacttagcataatgtcttccaggttcatccatgctgtgacaaatggcaagatctcctcctttttaaagggtgaataatattccattgtatatgtatattacagtttctttatctactcatccactggtgagagcacttgggttgtttccgtatcttggctattgtgaataatgctgtaacgaatatgagagtatagacatatttgcaagacagttatttcattttctttggatatatgccttgaagaggaattgctggatcatatgctagttctatttttaatttctttaggaacttccatacctttttcaacaatgactaccaatctacattctcaccaacagtgtagaagagttcccctttttccacaccctcgccaacatttgttatctcttgactttttgataatagccattttcacaggcatgaggtgatatctcattgtggtttgattttcatttttctaacaactaatgatgtcaaacacctttccatgtatctgttggccatttgcatgtcttccttggagaaatgtctattcagtttctttgcctattttgtaatcaagttatttatttttatactattgagttatatgagttctttataaaatttttgatattaaccccttatcagatgtatagtttgcaattttttccctaattcacaggtttttgtttcattttgttgttttctttggtatgcagaaagtttttagtagtcaggattcacactcttaaccagtgtattagtctgttttcacactgctgtaaagaactacctgagactgggtaatttatgaagaaaagaggtttaattgactcacagttctgcatggctggagaggcctcaggaaacttaaaatcatggtggaagatgaaggggaagcaaggcatgttttacatggcagcaggagagagagagaacaagaagggaagtgccatacgtttaaaccatcagatctcgtgagaactcacttactatcacaagaacagaatgggggaaaccgtccctatgatccagtcacttcccaccaggtccctcccctgacacatggggattacaatttgagatgagatgtgggtggggacacagagccaaatcacatcattcctcccctggcccttcccaaatctcatgtccttcttacattgcaaaatcagtcatgccttcccaacagtcccccaaagtcttaactcactccagcattaactcaaaaggccaagtccaaagtctcatctgagacaaggcaagttccttccacatatgagcctgtaaaatcaaaacaacaagtcagttacttccaagatacaatgggggtacaagcattgggtaaattctctcattctgaaaaggagaaattagccaaaacaaaggggctacaggcctcatgcaagtccaaaacccagctgggcagccattgaatcataaagctctaaaatctcctttgattccatgtctcacatctatgcaaggccacattgatgcaagggatgggtccccaaggccttgggcagctctccctctgtggcattgcagggtacagaccccacagcttctttcacaagctggtattgagtacctgcaggttttctaggcacacagtgcaagctgttggtggatctacaattctggggtctggaggatggtgaccctcttctcacagctccactaggcagtgcctcacgggggactctgtgtgggggctccaaccccacatttccctgctgcactgccctagtagaggttatccatgaagattctgcccctgcagaagacttctgccttgacatccaggcatttccatacatcctctgaaatctaagcagagattcccaaagctcaactcttgtctcctgtgcacctgcaggcctaacaccacatgaaagccaccaaatcttggggcctgaaccctctgaaacaacagtttgagctgtaccttggccccttttagccatagctggaggtggagtggctggcatacagggtgccaagtcctgaggctgcacagcaacagggccctgggcccagcccacaaaaccatatttccttcctaggcctctgggcctgtgattggaggggctgatgtgaagatctctgaaatgccctggagacattttccctactatcttggctgttaacattcagctccttgttacttatataaatttctgcagctcgtttgaatttctccacagaaaatgggtttttcttttctaccacatggtcaggctgaaaattttccaaacttttactctctgcttcccttttaaacataatttccaatttcagaccatctctttgtgaatgcatatgactatatacttttagaaacagccaggtcaaatcttgaatgctatgctgcttagaaatttattctgccagataccctaaatcatctctcttaagttcagatttttacagatctctagggcaggggaaaagtgctgccagccagtcttttgccaaagcatagctagagtgacctttgctccagttcctaagaagttcctcatttccatctgagagcacctcatcctggatttcattgtccatatcactatcagtattttggtcaaaaccattcaacaagtctctagcaagttccaaactttcccacatctttctatctttttctgagccctttaaactgttccaacctctgcccagttccaaaactgattccagattttcaggcatcttatagcagtccccgacttctctcagtaccaagtttctgtattattctgttttcacactgttataaagaactacccgagactgggtaatttatgaagaaaagaggtttaattgacttgcagttctgcatggctaaagaggccgcagaaaacttacaatcatggtggaaggtgaagggggaagcaggcacatcttacatggcagcaggagagagagacagcaaggggaaagtgccacatttttaaaccatcagatctcatgagaactcgttatcaccagaacagcatgagggaaatcacccctatgatccaatcacctccgaccaggtccctcctctgacataaggggattaaaatttggtatgagatttgggtggggacacaaagccaaatcatatcaaccagtgataggtacaagcttccatctgatctcaatcttattatatatttcaacacacaagaaagaaaaagcactcttaagcactcatcactcatataaatatcagcatatctatatatgtttatatataaatatcagcatatctatatatgtttatatataagtatcagcatatctatatatgtttatatataagtatcagcatatctatatatgtttatatataagtatcagcatatctatatatgtttatatataagtatcagcatatctatatatgtttatatataagtatcagcatatctatatatgtttatatataagtatcagcatatctatatatgtttatatataagtatcagcatatctatatatgtttatatataagtatcagcatatctatatatgtttatatataagtatcagcatatctatatatgtttatatataagtatcagcatatctatatatgtttatatataagtatcagcatatctatatatgtttatatataagtatcagcatatctatatatgtttatatataagtatcagcatatttatatatgtttatatataaatatggtagtgggagaacttatatatgtgtgtgtatatttatatgtatatacacatgtttatatgtatatacacatgtttatatgtatatacacacacatatgtatgtgcttgcttcagacatttgtttttaagaaataaaaatttctagtgcaattgaaatccctttttacccctcctctattcttttttcttttgtccatatgtaggtaacacttatcctgaaatcagtatgtttttttcccatccaactttttgtacctttgccagatgcatacactttttaactttgtctaaaaaaatagtgtttgtagcactcctctggggctaggtgttatttccctcactttacagatagaaacactgaggcttaagtgacatgaccaaaggccatgtggcttggaaatggcatagggaggactggatctctagaccttggattcttttttgatgttgtgggatattttaaatctcctgcctcccttgactcttagaggatttgagactctagatgtatttgatattggtatttgagatgtgaaaagggaggattatttgaataattggcactttataattttccaaaagaattgtaaaaatttttccttttctcatcttcctccagaatgcatgtctagtcagtccaggctactgtgtatcataaactgcttaaataagaggaatttattcctcatacttatggagactggaaagttgaagatctaggcaccagcagatctggtttctggtgggggccgcttcttggtttgtagatggctgtgttcttgtcatagcctctcacatggcagagagcaaagagagagggagcaaactctcctgtaagggcactaatcccattcataaaggctccattctcatgacctaattacctcccaaggaccccacctcctaatgccatcacatcaggtgtcagaattgcaacatacgaattttgggaggacacattcagtccatagcaatgcacactgtgaattttatgttaaagaaagtggttatctcatgaaaacggttagcaaaaaagcccttgttattgttgaattcaaaagagtgttgaactcaggagcgggttctgggacatggtaaatgccatgttacactgagcctgcttttgatcatggtgtccactgtccaggaatttttctcttttgtaccaaccgttgttatctgcccagtcatgttttggagcatagatagatatagctgattggtgaccatattagggaaccaacatcagtggtcagagataaatgacctggcagaagtaaaaatgccagaaaaaagtcataaggatagtccggatgcagttgatgcactaggcatgggtttggattctggtttggctgcttttctgctaaagaatgtgttggaatttcttccccacctgtttgatctcagtgtcaccatccagcaagtggagataaagccttcttgcaatgaatccctggggatttatccctggaagcatgtagcccagtgcaatatacatagttggtgcacaattaatattgattgaacttgaacctgggagccagaataagaatattgggtgtaagtgtcagcagaatcctgtcgtcaggagtgaggtgcaactctgagaattaggaaacctataagacgtacacacataaccgagttttgagggtcagagcaggcaaactccttggatccaggaagacaagttaccttaatggagtccctgtcacagagatgcagatgtggacatgagctttgtgtagggaccatctattggtccctcgattgtttttctgttttttggtggattttagtgaccttagccatcatgtgggttcaagtcactgctaccagatgaccctatctctatttgcactctaaccccatcacatgggagacaatgtggccaaccagctttaaggattggctttgaagtcacataagcttgagtttgaactctggttgtatgatcttggcccagcccatcaattgacttgaatatcagtttcctcatctataaaatgggaatgataatacttagctcacagtgtcgctctgaggattaaatgagagaatgcctgtacaacgtttagcatacagctttgcatgttgcaggtgaccagtgaaagacaggtaataataatattacaaagttgcatttctgtctagttggtgaaaaggggcaactaaaggaggttgttgtagcacagcgcagcagggtgttgcttgagtgtaaatctcagctgcatcacccactagctgtgtgaccatcagcaagctgcttaatctctgtgcctgtctattttcatttgcagagctgaagcagtaatagtacctacttaataggattgttgtaaagattaatttacaataagacaaaacaaaaaatgtcaacagagttaccagcacataggaagcacttagaaagtataagcagtattgttaattatggattatttttcaacagttattgacaaataattagaggccactgaaaatagaatgtgatgcttcatgaagtagaacatcttccatcactggaagtattcaggtggaaagtagcttagtggagatttagttttggagatttagacattgagaagttggaaatattaatattaggtaaccatcaaatcattccctcataatataggaagcataggtgatagttgcttatgttgaaaacctgacactgcaacctactagctgtgtgatccttggaaagtcacttaacttctctgtgcctcaggtaggccactcatttgtaaaacaggataataaccgttcctacttcatgcggttgttatgaatattgaagggcttaatatataaagagtgcttagaatggtatttttatttcccacctgagattctctttccaacctccctttcttccttctgtttttcctctctccttcctttctccttttctccttcctctcactttctgtcactcaaaaagaagctatcacggccccctgttgcttcagagtttcctttaggacctggccgtcaggctggctcatgactatgaagggtgactttgcatgttaagttgtttgtttttgggcttggttgtatgtctgttgggaacatatttcatcaacaatctgtcagcccggtaatgaggggtctgctagtgaggctcctgacagacgcgttttatttacaaagatgacaaatgccactccttggctgtgttggaatcatttcaaaggccagccgactcattacagtcatcaggacttgctgcactcaggcgtattttgtctgaggactgtgtgtaatttggatttctgctcattgatacattttttaatataatattcctgcaaagggtagatctcttaaaatccctgtccctttatctgtccctaaacttacttgttttgtaacgactaacttttgtaaatcgcattttagacactatttgctgctgttagaactgtcagtgttattttaggatgtttgcccaaatcaggagcatttctttgtcccgaaggcaggaattgaaagcatgcagatggtcacagggcccaggaaggcaatggacacaagggaggggctgcgttgaggctggtggactggaggcagatgctctgtctggtggaccctgctgcttttctcctcccagccagttgggagcactggccagcactactggggctcctgatttttcaaaatcaggagcacctttatatgaagtctatttttagatgttattttgagatgttggcaaccaattcaacagatttcaaagactatgagcttccagagtttgatctgtacccaaggtctaaagcaatttgcagtagttttactagtttaaaacaaaacaaaacaaaacagaaaaacactagcaacaaacttgtaataaatgagggaactgtttctttgttttctttttgcagactggtataggggatacctcataaagcacaaaatgttacaggtaaggtcacctggtttttatttgtgtcagtactggaggtcttcatatggccccgctatcccatctgagcaggtctctcccaccattgctcctcagcaaagggaatccatctctccctcctgtgccctgtgctctctgacctctgtgccttgtcactcgctgtgctcagctccctcccactttccctcattctttaaggttcatctctggtgccatctccctgcaacttttcctgatatgccactcacttatgatttctcccttcctcgagtctctgtggaattgtgcgttataaatttgaaatttattctactgccttcctttagagttgtttgcagcattcagtcatctcctcatccgtatacccaggtcaacacagaaaggacaggcctgatttctacttttgaggggttctcttgttctaacctcacatttcactattgtctccatgagagcaggcgcttgctttgcttgtctcattttctctcacagcacctagcacagtgaccagatgtccccagtatgcacattggttgcatttatgaagggatttccaagtaattgataaacttaccttgttaactgagccaaatgtatggagtaaggaaataatagaagcttcttccttcttccctgacatgctgtgtcgggagggatggtcctattctgctctctcaaagaacaatggaataaatgcaggcagaataggtctcaaatcgaactagcccaaatgcacctaggaacattgttgcttcaggaccagttatttctgaccttccagttgttcctgactgtgaagggtgaccgctttccggaatcgggcaggcaatgggagaagcagagctcctcgtctcgcttaaagtcagtgagtggtttaggttgtctttcaaacgatactgtcttatagcccacctgcaggatgagtggccataatgggttggagcatcccttgggatctagggctatggtgagatctagggctattgtgggatctagagcaactgatggagaactggagggaaagccagatctaaacaagtagatttagaatccagcccctgttctatctggctctgggtttattcctttaaagtctggggattttataagccagtagcttttggaaaaaaattataaagacgtagggtcattcatttctgtggtgatatatctttttattttattttgttttgttttgttttgtttccaacagggcatttttcctaagtcatttatccacatcaaggaagtgacagttgagaaaagaaggtatttgccattcttcaccagacttgagcctccagtggctcatggatgtctctgtcctgtttattttgaaaatctgacttggaagagctgagggttgctcagcttatcttctttgtgcctgtgtatatttgtgggtctcctttccgttactcaatgggagatctaatccaaattgattcatactgagatctgactctgagggggtattagtttggagaatcaaactttttgctggcagctaccttagaactgtattaaagtagattaatcctaaataatgagcccaccctagcgaaggaggacataacaaagcaagtcccttgtatttgcataatgtagttggtgtggctattggaggtgttttagtctaatgtcaggaaggcccctccgcagctgcagcttaatgcaaatttgttggtgttttatcttgttagcacctgggtctcaatttcacaccactttttctcccaccttaaatagaaatactgagaacatcattcctgcagaaattcctctggcacaagaagtgacaacgacactttgggaatggggaagcatctggaaacaactctatgtggtgagactcagaactctgctccctgagttggaagcttcttgcaatcttcagtttggttccagttttcattttagcattgagtcaggcaggtggaggtggctttggtgacatagcagagcgcacactattacgtgtgaggacatcaaggcccagagaggatcagggactttctcaaagccacagagctagtgacagagccataatcaatggagtctactgtgaaccttcggtgtttagtgcagaagttgtcaaacttgagcatgcataagaatcaccttaagaactgttaaaaataaagcttcctcccaaggggtttaataatctgcatttttaataaactcagatttgatttgctagtctgctgataacacattgagaaatactgttcttatactttaaccaatggctattgtcctcacatctatgaagaagttttgactttggaaaaacaaagaatatatttttgcatttgttttccctgttttgaagcaaatctaattttaaatcctcctttgatgctctaaagctcctaatgaaagcaattagctaagcaaaccattaagctgagagtgaaaatgtcaaccaaggcttactgcatgtttattatggcaccgtggacacctgctggtgtatgcacaggatttgtagacttacctttcgtggtcttaaatgttgactcccatgtggacatttcataatatgaagatgtaattggcacactcaattttacatgtttctcaaagtttttagaaaagtgtaggggaaaaatagtatccttgtggctaaagcaattttttgttcatctccactatacgctgaccttttttttttatttattttttatttttttgagatggagtctcgctctgttgcccaggctggagtgcaatggcatgatcttggctcactgcagcctctgcctcctgggttcaagtgattatcctgccttggcctcctgagtagctgggattacaggtgcccgccaccacgcccagctaattttttgtatttttagtagagatggggtttcatcatgttggtcaggctggccttgaactcctgacctcaagtgatccacccaccttggccttccaaagtgctgagattacaggcatgagccaccacgcccggcctactaccccttttaaaacatcacaatcacacgtaccattgaagcttggcattttcccttaggaaatctttgaatagcagtaagtccatttactctagtcaggagatccttcaacatctagtacttcggtatcacattcctgattcttgccatatctgcatacaacctgtgtaatatttacttaatagctgctttggatctcctttcagtaaacctgaatctatagacataaagaatgagatagcatgctgcatcattccagcagttcttgattccccgtcaccaactagatgccccacaattcagttcaacgctgactacccagggttactgccagactccatgggtttaaagcctcaatcccacaagattgccctcactttagatgccagtcgcaagtcctgggttcccaggttacctgaacttctgttggacttggctataaattcagggattctcactacccctccctgcctgggcacccccttttttcacttccagtttcataatttgttagaacaactcagagaactcaggaaagtgctatacatgtgattacggttttattataaagaatgtaattcaggatcagccttgtggaagagacacagggctaggcatagaggggcatagagcttccgtgtcctcggcacaccaccctcccagcacattgatgtgttcaccttctgggaagcccctcaaatgttattaaccaagagttttaatcagagtttcattacacaggcatgattgattaaattattggctattggtgcttgagctcaatcctcagtccccctcccctcccagaggttggggtggggcaggtggaggggagtggggctaagttccaaccctctaatcatgtgattgggggtttggttcctagttggttcctctgcaaccagcccctcatcctgaagctatctaggggcccacctagaatcacctcattagcataaactcaggtatcattgaaaggggattgttaggaataacaaaatacattcttatcactctggtcattgcaggagttttaggagcactgcttcaagaaccaaggacaaaaatcaagtgtgtatatatatatatttttttgttgttgtttttttaattataccacccacactttcccaaatggaaagacaaaagtacttgacacaattagaagaacattattcatctaaatacaatgaaaacaagataacattatttttataaaaaaaaatttagagacagggtcttgctctgtcacccccgctggagtgcagtgggaccatcatagctcactgcagtgctaaactcctggcctcaagctatcctcccgccttagcctccggaacatgcttgctattgtacctgtcaaaagctctgagtccaaaccttttctctctgtttgttaaaaaagacattaacaatatgtgagaggtgttagagacatattactatgaaactgcaactttctctttcccttacacagaaggatggaaatggagtgggagagaatcacctagggatccatgttgtttgaccttgtatctttgtaccacgaagagccatcttgcttcccataggtggtacgcgtgccacactttggagaatgctgccctagaagcagtcctttatcaccagagaaatggccctggctcccagcctcaaaaggcctgagctctgggacctccattagggcagatgttcgtagcattcctgttcaataaatatctttttagataaagtcagaaatcactcattccttaaccaagaaatgattgagatttttatttttgcttttgggaaatccctgtggtccacggggaataaatacatcaacgactaggacccccacctaatccttttgtagtgggtagggcagggagagagcctcaggccatggcccttgaccacactcacctgactttggcacagcctgccaaatagatggtcatgcccctttaacacaggtaattatgggttgtttcttgtctcctaggccagcaaaaaggagcgttttctccaggtgcagtccatgatgtacgatctgatggagtggaggtcccagcttctctcaggaaccttacccaaggatgagctgaaggaactgaagcagaaagtcacgtccaaaattgactatggcaacaagtaacctctctttcctctgcaaagaggttttcttcccccagccatcctctttcttccctctctccccagaagcttgttttcatttttagatgcaattttgtcactttctgtttgggagaaggttgtgaccaatggctgtgcttgcgtgctgttgttaccacccctgggggacctagggacatgcaggtggagagaaggcttgtacttaacatggtgttattaccaggctgagagatttaggacactcatttaacctacttccgatggactagggagcatagtcatgctggttcactttcagcttagttgtcattttatacctgcatttgcaaaactctcccttaaatcccaatgtgagacttaatgtctcttcccccatcctaaagtagccaacccacacaccatcaactaactcaaatgcacaattacaaaaatgtttcctcaaaagggaagagaagtaaaaattggttggatttgaatgctatgaagttaaggagaaaatgaaccaattatttgaggtgggacaacccactgataataacattataagtaactcttaatcagagctcattgtacaccaggcttggtgctaagtgttttgcaggcattgtctcatttaattcttataataactctatggagtatgcagtttgattatccccacttttttccgataaagaaaccgagggttttcagtagggtaggtaacttgtccagagtcgcgcagctagtaaatgacagaatctgaacttagacccaggcagtctggctccagggtccacctggagtccagggcctcctggagtggagtccagggcctcaccactctgctacttggatagcatttgagaactataaggaccttccctccctcctgatcttttgaatggcttccaaacattctgttcatttgttcattcattcctaccacaaacatgtattgaggacttatagttggctggatttcctgctaggtattggggctgtagaaataaaagtccctgtccactaaagggtcacagttccaattaggagtaagccacaagtaaactgctgatatgtactgtgagaagttcgatagctcaggaagcaagagttacttttaatgagccttagagaaggaagtcaaggaagacttcctgaaggaggcgacccctgagctgaagtttgaaggataaagagatattaagcaggctaaaaaaggagagtcaggggctcatgagagagcatggcatactcaaggaactgcaaagtgggtctgaaggctggaacacagggcctgagggggaagtaaaaagcccatttaatgggaataaaaagaagtttccccagcagccaggccaggctttcttgccctgacataagcactagggggaggattcggagaggaaagtcaatggctccaactcacagctggtctccatcccaggaacacagtccctctgctgatgccccattggcatctggcaagcgtgtccaaatctgcttataaagcacatcatcctaaagtgacaggaagggtttgccccgcagctgctactgccgttggttccatgatgtctttagctgagcacagttgcagctgagtgtgtgggaattgagggctgctttacaatgacatctacgaccttcaaatgttgttttctcaatgggggctcctgagaagaaggaccaggaatggaagaagtggtcactactcataggaagccttccctgattttccactacccgccttggcccggggtaggtgctcttgaaggccctgagtagtaattgcctcctttttggcctggcttccctcctattgtggaagatcctatagatgttgactgtctaaagcacctctctgcctgtgcctggaacaaggtctgcacatagtaggttctcagtgagtgacaactgagtgagtgggcgaatggtggtgatgggagaaaaagaagaaagagggtcctccctaaaccagcccctcctctgcagcatcctctgacctatagccctgtgcttttagttctgtcagtttcctttggggaagtgagggatgctccgtggcacagactgagacctcaagctcaggggcccccttattcacctgactgcttcagctgcaagcgagagagttgggcaacttatcactggcctgatagtttaggtgctcagagctctggtatgggatgggcagcttcctcaaatccaggaggcccagcgtctgggccaagtgtcaggatcagcctgggaacacccacctccaacttccagcagctgggagattgggtgggggtggcacaaagtggaactgaaccttggaggagtgatcagaatgagcttgtttcttctctcattcattccgttccttcattcagatatcaaactttctttgcacacctggtaggccccaagggtacagggtacagacacatacacaatacagtctctgtttttaacaacaatcaaaaagcaagcaatgagaaccagtgataacttctgaagcgctcactgtacaccaggcaccatttaaagcactttccatatattaactctgtgaagtatcaaaacaactttatgaggtaggcactattctcaccctgtttctcaggtgaggaaagtgaggctcaagagtgattaggtgtgtgagctgagaaaccaacacaggtgcctctttatcaactaagatggactctaaggttaaggaaacaacagctgcctatgggtcaggttgagcattcaggggagctggcatggcaactccctaaattcctacagctacaagaaaaacacactcttgtcaaactccctaacaataggagctatcaggcaaattatcagacccttcctaactctgatttacatccacaccactataactctaagtggacagaggactggcctgctaaacattcttttttttgataaagaactgcaaatcttaagtcagtttcagctagctgaaggctgcccgcaaactgtgtccagtagttcaccttttgatgtaaagtgccaagtttcatcttattttaataataaaccccaccccaaagtgtacatgggatgtatgttacatacatgtttacccgttgtgcatgctcttgtctccataaatatgtatgatttttcccctaaacctgctgaatatgtatgatgttggccctgtgaggcataaaacccaacatgtcctttccgtcttcaaagagagagcaccttccagacatgacagagactgtctcttcaaagtttgcaaaccgatgtaaccagtgaggttctccttttgtaatgaagtgcaggctctgctgctcgctgcttgcaaagccagtaacggggacacagggcattgtaaggaaagtgactttatttccgaagccagccatggggaaacatacaggctcacccctctggaaaccacttcaaaactctgggctgagggcaggggtttcaaaaagggaagctggatgtgggaggcatgcaggagctgtgtagggtgcaggggctgtgtgttttgccctgatgccagtcttgagttatggtccacctggagcacagactggtgccatcttgacagtggccaggctgtagatgatccatcttgaggcagtctttaagtgggggagaattctgtagctgcgctctcatgcctggtttgttttaaattagcccctggaatttcttaacaagcacagagttaagtaaatgtgcatggagtaagagagtatatgttagaagacggaagggaatggagcttcaaagtatgtttcaagggtatacttaagactaaggaaaaaaaaaggcttctatagtttttctcaaggttacatcttcagtcttgagaaaagtttttgtttttttttttcttttttgagacagagtctcgatctgtcacccaggctagagtgcagagtgcactgcaacatccgcctcccaggttcaagtgattctcctgcctcagtctcccaagtagctgggactataggcacacgtcaccatgccaggctaatttttgtatttttagtagagacggggtttcaccagtctctaccaggctggtcttgaactcctgaccttgtgatccacctgccttggcctgcaaaagtgctgggattacagtcataagccaccgagcctggccaagaaaaaagttttaaaatgcattttgaagctgagatcctcggttacactttctactatttggccatcctggtggtcttttgaacggcaggtgattttgctcaagatgcagtggaatttgaactgataatgtggctccagagttcaagtgcttgactgctgtattctactgccttccatgagctgtgtgagttaataagggaggcagagaagtaaacagccactttcagtcggaagtcatatacattaggagtgcaggaagcatgggcaagaaggttggaggacatgggggtgggagtcagggtggggatgacaaccactctgaatctaactagaccagcaggaattattaggtgaaatggagaagagaaactcggagggagagaatgtgggagatgagaggttgacatgaccacggagaggaagacatgggtggactggggctggaaccttgaggattttagcaccaactgagtctggatttgtccagacagcaatggggagccatcacagatttttaggctggcatatgcagtggtgcagtcacagctcactacagtctccttctcctggggtcaagtgatcctcccacctcagcctcccgaggagctggaactacaggtgcgtgccaccatgcccagctgattttaccttttttaaaaattttattataaataaatgcatacagtggggccttttccctctaccctcatcttggcttcattttatcacttccttgaacagaagagagcactggggttacatcctgatgagagaatgcctaaatgttctgctccccaaaattcatggtggctgcattcagaggctgtggaggacagcctctcctgcccctgggccatgagagtcctgtcaatcctaccaaagctcccaaagttccaagtgattttgatgtccaaggattgaggaatcctcaaatgacttcttcacatcccaagatagccagacctaggagaatgttttattcatgtattttagaaccgaatccactttgataaattttgaggagaaacagccagagagatcttggcattaaattatgtatcagcgatgctccatcttttccaaggtcaggagagcctctgctaagcattagctgaatgtgtttcttcccccttagcattgccgttgggcagcatggccgtgtaccattatgagtcatgttaagttgggagttaatttcctaatgaatgtggacaaatgggtgaaccttggctcgcttctgactgcatttggatgagatgagagatgcgcctctcaattcgattctctgatagagatgaagacttagtttccttcatttgtccttgctacccttccagaatctggtacttagtagtcgcaaccaagcaggagtatggttggccttctcagaatccatcagccccacctcctcctaccttctttgtatggacaactgaggctcttcatctcaatatcaagtgcaaaagcagtttcaagttcaaggtttctgcaaacacaccctaccccactccacaacccatatactgctcctaagctcctcctatctattatagtaagcataccagagaggttatgagtgtggacaaagatgtattcttagtttttactagctatatgaccttgagcaattagtcctcatatcctcagtcttttcttcatttgtaaaatggggttattgatagtacctccttcatagggttgttatgagaattaaatggattaattttatgtaaaacacttattgtatgtgagctgattgtaagtgctgtgtgagtttgctgctattagtatcactgatgccgatcaggatgacaggtgtagttgaaacaaatcaataccaaacagggaaaagcttgtggcctggaagtcaaatagctgaaagcaagctgtgggtaacagtcaacatgtctgagattgtttttccccaaccactattttcaaatttttattgagtaatatataaatacctcctctgtgtatatatttaaaaagaggctaggtacggtagtagctgggcatggtggcatgtgcctgtagtcccagctgctcaggaggctgaggtgggaggattgcttgagcccaagagttcaaggctgtgggaagctatgatcacaccactgtaccccagcctggaagacagagcaagaccctgactcattaaaaaaaaaattaaataaattgagacaaggcacatgtaacctttgacccctttactcctccagccctaggcccctacctgtccccacagataacctgtgttggtagtttggtccttttttcattcagagctttctctcatacataagcttattcttatacatgaacccagataacatatctggcctattttttgtttatttgttttattgttatttatttataaaaataaatattgtatgcacactgtatgcatctttccatgcttgatttttgcactgaaatatattattaaacatagcaaaactatataatattttaaaaggtctgctatgtggtattccattatagatagatcactgttgatttagccatttctcttttagtagaccttttttttttttttttttttttttttctgagatggagtctcgctctgtcaccgaggctggagtgcagtggtgcaatctcggctcgctgcaacttccgcctcccaggttcaagaaattctcctgtctcagcctcccgagtagctgggattacaggagctcaccaccatgcctggctaatttttgtatttttagtagagacagggtttcaccatcttggccaggctagtcttgaactcctgacctcaggtgatccacccacctcggcctcccaaagtgctgggattacaggcgtgagtcaccgtacccagctaacattttttttttttttcaatacttgctgatgtgaacaagtctgcaacacatcctagttcaagtgttgggtgtttcagtttaataccatggaaaatacacctttttaaaaaattgaatgcacactactacagtaccttctaaagggggtctactataccaatatgtgctcactagcagtgtcccaggctatcagtgtagagctcttctatgtgactatatgacccccagaaatcagctgaactttctggtaaaaagcttctcaccagtgacctaaagttctcccctgatttgtcttcacctccagtttttgctttacagaatccttgagcttgatttgattgtcagagatgaagacggaaatatcttggaccctgataataccagtgtcatcagcttgttccatgcacatgaggaagcaactgataaaatcacagagcgtatcaaagaagaaatggtgagctttactaaataggctttggccaagtgatacaatcatttagcacatcataaacttaaaataatgggctaatgaaccagactgtgtattattcaaggggcatctgtctatgacctgagatgatcagcaaccacatgtgtttaactgtggtttcgtactcaaatctgtaattcattcaacatccatctcacaggtagttaaatggcaggcaagtttcttgatctcttggagcttgtagattccagaaggggaaaagaagaaaggcgataacaaagtaaataaataagtgaaaatattaattccagatgagtgtataaaaggcaatgaaccagggttatgtgaatcaaagtgactcaggagctatgttaaaaggcactgccaggagaggcttctctcaagagtgacatttgagctgacacctgaatcatgtgagggcaccaggcctgggatgatctgggacagggtgttccaggcagagggcacagcaggtgcaaaggccctgaggtaggactgcattctgactattcaaggagtaggaaagccaaacaaggatgaggtgtggtgaacaccaggggagtttaggcaatgatttgcagaggccgggtaggtggagacagatctcaaagggcctgaggggttttggaaaagagttgtgatgttattcccacggatgggaaatcagtgagagatttcaaggaaaggttaacagtctgacttttatttaaaaaaattattttagctactctgtgttatttgaaagcaattttgtttttagatttattaagatataattttcatatagtacatttcactcattttaaattactctttaatgaatcgtaataatatattgtgttggataaacatcgtgacaatcaagataaagaacacttccatcaccctaaaagtttctttgtgctccttctccagccccaagccccgtgcaacccctaatttcctgtcactgtagatttgccttttctagagtttcatataagtggaatcgtgcagtattaattttctgtttgacttttactcagcaagatgtttttgaggtttatgttgttgtgcatattaacattttggtcctttttattactgagtcagtataccactggccagttaccaatggtatatagcattgaccaattattgggcatttgggtaagttttcagttcagagctattatactaatgcaactatgaacatttggaaacaaatccttgtgcggacatgttttaattccttttgggcaatacttagcagtgggattgctggatcatgtgataagtgtatatataactttttaaggtattgccatgctgtttctcaaaatggctgtacaattttttttgtttttttgagacagggtctctcactctatcacccaggctggagtataatggtgtgatcatggctcactgtagcttcgaccccctgggctcaggtgattgttctacctcagcctcccaagtagctgggatcacaggtgcatgccaacatgcctggctaattttttttattttctgtagagatgggttttcactatgttgccgaggctgatcttgaattcctgggctcaaatggtcagcccatctcagccttccaaagtgctgagattacaggtgtgagccaccacgccagcctaattttgcatttctaccagcaatatatgagagctttagttgctctacatcctcgtcaacacttgatatcagactttttaacttagccattctagtggttgtgtagttgtatctcattgtagttttaattttcattttttttgataagtagtaatgttgagtatctctttatgtgcttcctgtcatttccacttgtattttctcttgggaagtgtctggtcaaacattttacccattttaattgggttattttcctcataattagttgtaagagttatttgtatgttctagatacaaattctttgtcagatatgttttgcaagtttctccaaatctgtacctagctgttgcatctttcaaagagcaaaagtttatagttttgaaaaaatccatttaagcaatatttttcttttctagtttgtgctttttatgacactaactttatgaagaagtctgggtcaatggtgacatttcccaagatagaaaaatacaggccaagagagtcaaagcgaattgattcaggttacagaagcttttgatggcagagctggatggaatgcccaaactttaggcttgaacccaatatccttgactatctctctgttgctctaagtggtgctaggctaattttctccatcttctttccttcttccttctgcctttcagtcaaaagaccagccagattatgcaatgtattcccggatctcctcatcccccacccatagcctctatgtgtttgtgagaaactttgtgtgcagaattggggaagatgctgagctcttcatgtctctctacgaccccaacaagcaaacggtcataaggtaggtgtgtccagggttgccctacttctctgactatgggaagcagtgcacagagcatcttttctttccatcctcacttgtggagcaatctccacctggaaaagagactgcacctgagtgagaatgtggaaataacttctttggaggttgtaggagtcaagtggaagtgttatttaccaccagttttttcccacagtggagtttatggttgtagggttttgtaaaatagattttgattgccagaaagcagtcagaaataacaagattcagacaagtagcattggctagaataaaaatatgtacttcttttttgttttgagacagggtctcactctgttgcccaggctggagtgcatgggtgcaatcacggctcgctgtagacttgaactcctaggctcaagtggttctcccacctcagcctcctgagtagctgggactataggcatgtgccaccacacctgcttaatttttaattttttatagaggcagggtcttgctgcattgtccagtctggtgtcgaactcttggcttcgagtgatcctcccaccttggcttcccaaagtgctgggattataggggtgagccactgctacctgccaatatctactttcaaaataggagctaagaaatgaatgctccaaatcctctgtagcagcaataggctaggggtataggctctgagatctgtctgggttcacatctaggccccagcctttactctttcttaacatggggcaggttgttaatgtttcttaagcctgagtttcccatctgcataatgcgagtgctgacctcacagggtcatttgcttcaggctttaatgagaaagagtttgtgatgcacaaggcctggcacatgttgcctgtactgcaaggggcagtggttgttattattactactttaataagttgttcttgggaatggaggaagtgagggaacttctgggtgcctcagctcaaggaagggaaaatactcttgggaatctccagggaagagactttgctgctcctccggctcccactgccagactcctggcctctacttgtggcttagaccatccttcctctcaggcgaccactgcctgtctcctccattggggttttagcccaagacatggtctcatatttgaggccactgaccgtgactgcaggcatgcgccaccacgcccggctaatttttaagtttttgtagaggcacacattagaaaagagctaggacatgatctctctgcctttgtgggaaaaatggataaaatgatgtcttcctggcttgttgttatgatgattaaatgaacgaatacaccatgcctgaggaatagtggtgctttagtaaacagcggcctcctggagacatgcatgaaactggaggggctgtccatctcagaagaatgtgctggggtctgtacattgtctcatctaatcctcatggttccgtgtcactaagatgagaaaatgaggctcagggaagtcaagcaacttgcccaaagtcacaaatatttgtaaacagcagagctgggatttatatacaggcccatctaactccaaagacaagctatttcccacgtaagtctgtcaccaaggaatgagttgtgtcaaatattctaaatggttttcaccagggtttcagcaccattatggtggaaaggtaatttttattatgcaccaaagtccctaacctcaaagagtcagcccaattcacctggcttagccttggtggaccccgataatgagtgtccctggtcccttacgcccaccttgaaatggtttgggagtcagaggcaggggccccttgctgttccctgtcagttactcccaaggttcctgaaaggctcactggctgcagtttcaggagccttagaagcaaccgagaggaaacagtatggggcctatgacacacagcagatctgaaagtgctcactgcctgccacattgacaagggagtgtggtcggctggccccatctcagtgatggatggctggaccagctctgtggagggagaccatgaatcagcgaggtggcagctgtgctccctgccgtgccacctggcaggccatgctcaatggggtgtgcctgagtgacatctctgagagtgctggagacgagggccagcccagggagagtggggatgaacagagagaggaggacaaagggggcagaaaccagcaattgtgaaaagaggagaaagcaaaggaagaagagaagaggcacaatgcaggaaggagggcaggggaatctgggaacactcccaatgtcagtctcactctgaagagctgctctttccctaagcaagaaatctgggctcctgcctgctgtagccaggatcgacatacagtgaacaacaggcaggttaagacatcttcagtgtggcccagatgtggactggggagaatatagctaggatcgatgttttaatgttggactgaatcacggtcagatacccagtagatccctgaagggatcctgtttgggaaatttaatgtaaatttttacaggacaaaagagaagcagttcaggtatcaggctagcagtaaggcttatgcccaaaaattgtgtgatgaggagttggaatagtactcctcgttcctctgagtaggttgtcatttggaggaggtcttacatgtcttggtgctgtgagccttcagattctaccacctagatcttcctgggtgaggatggatgggaccagctcagccctccaaattgttttccttatttatgattgtgcttctcctggaagaaaattgctggtgcttgctgtttagacgtagcaagctgggtcactgaggggcttgctacatatgatggaaggtactggaatatatctaagcatttcactaacaacagtacagaaattaccaatgagaaagcattaaaaataaaaaaaatttgcatggagacttcctagttagtttactgcaaactccactacaatttttagatcttactgaaaaaaacacaaaagatgaaaagatccacttaacttgattgagttttaagcattggttaatctgggactgtgttcatttttgctattggccccattgcctgcttgaactctgctcagtctgctctcattaaccttttaggggtgactggagagagaggaacgaggcatcagagataaaacaagctctaaaaggaagtcaagtccctttaattttgctgaatcccgttatgccttcttaggctaacttgatttttgaatttttaaaaaatcttgttcctaatttaaaataatgggcacttatttagcaccaactatatgctcctaaatggcgtggaaaatctgatgactcaactcagcaaactatattaagcttcttctaacttaaataagtgctagacctctctatcttcctggagtgatgggactgaccagcatgacggctgctaggagatatgagatggcaaaggatcgtacgttagaaccatatagctggtcctcataaaaccctccaatgggtttccattactctcatcatcaaggcaaaaatccttgaatggcctataaagcctatgtggtctggcctctccctctaatttttctcttgtaactttccgttgaatctgtttatttttatttatttattttttgagatggagtctcccttttcacccagactggagtgcagtggcatgacctcagctcactgcaacctccacctcccgggttcaagtgattcttctgcctcagccaccctagtagctgggactacaggcatgtgccaccatgcctggctaattttttatatttttagtagaggcagggtttcaccatgttgcccaagctggtcttgaactcctgaactcaggtgatctgcccaccttggccttgcaaagtgctgggattacaggcatgagccactgtgcccagcccccttgaatctgtttcctagatgcatccagctgtttcctgcctcgtggcctttactcacgttgactttgcctgaagcatttccctttcctaccttcttttcttgaccaactttatttcatgtcatttcctcagcaaagacttccttgaccacccactaggtcaggcccatttgatacacattcatacaacatcctgaacttttcctttatacagcctgactattccttatttgaaacgcttgggaccagaattgttttggatttcagattttctcttggattttggaatatttgcattatatatatctaccagttgagcatctctaatcccaaaatctgaaatctaaaatattctgatgaacatttcctttgagcatcatgttgacacttaaaaattttcaggtttgggagcatttcatatttgggattttcagattaagggtgcttagcctgtagcacaattttatataaatagtgttacaatggcatttaaacagttatttaattgtatcttagataatggctgagaccctatatgacccatcactgtatgacattccattcaaggaaacagctctacattcaaagggtaacttaaaataattcagatctttactcagtcttgaatggggaacgggccggaaagggtaaatatattcttaatgtccaataaaatatactaaagtcctttcccctctcatctctgccattctcaataacctctatcagtatgcagatgctcctcaaaaatattagacagctgtgccagaatttgcttagcagatgggagagggatagtagtggcaaatacgcataggttaatagttctttgctcttgcctgtctaatgtctgtctcccaacacaactgtgatctctcggagggaaggaccatgtctttcttaaacacctgcatacccccagcagccagtatggtgttgggcacatagtagatgcttggtgaatgttttgactaaatggatgtcaggtcccttggcagtaacgggctgccactcttcttcccacagtgagaactacctagtgcgatggggcagccggggcttccctaaggagattgagatgctcaacaatctgaaggtggtcttcacggtgagtgtgcaccctcttctcgttaccgtgctccccaaccacaaaaatgtgaccttggaaatgaggctggtcaggagctcagggtgaagtgtggctgtcctgcagagctgtgttgtgggctccaagcagaaatccaaagctgacaaaggacattgtgtgccttgaggaagctttcggaaagatggatgttcacctctgtttttcctcatctctccctatccgtctcactcctgcacacacagagaacatatgcagaatgctacataaacaagcaccaacttctttgagcaataatgcccaggtgaactgggcacaacagcaattttgattttccggttcattcatgattaacctgagttcctttctttgttcagggctttctgaaaaatctttctaaaatatatcagaaaaaaataggacctttctagaatattgactgccttggtaaattggacattctgaatataattaagtcatagatgactaacgatctggtgggtccttaggatcatccttctaaataccaatactcactgagcaagacatgtacgtagaaatgttgaaatcgattgttatttggatgatttatttctgagagcgaagctggctttttagctctgaataggggaaacaagggaaagaaggagataagtaaaggttataatttttagtagagacccctttctcatcctgtttccataagggtgtgaagagtgtgatttttttttttttttttttgagatggagtctcactctgttgcccaggctggggtgcagtggcaccatctcggctctcaaggagaatctcaagtgattctcctgcctcagcctcctgagtagctggaattacaggtgtgagccacctcacccagcaagtgtgatcttaagacacctaaatatcttagcattgtctgtaagcttctttggggagaacactgtttatgagatttttcactacattgcctgtattagctagggaaattacagagaaggagccagggagggatttgggcattgaccaaacagatgagttggatccaggagtgaccgacatgctagattaacctaccttgctctacaataattttttggttacagcccattaattgcaatgtcttatgttatgttgtgattacattgaggaatagctgattaattttgttattttctttaaaaaatgggccagaggcatggaatgggatcataggtcctaattgcttaggcaaagttttcttggcatatatagatgtgcctccatcctgtttatctgttattagttacaaggaggagcctatttattttctggataaataggagagtcccacaggccttcctgattaaaccacaagacagatgttgcatgagagggagaagaacggggaatcaatcagtggttcattttgcagagaaccaattcatgatgtaaacatgggggaaagagcatcagtaaatttgtgtcacacagcattaatgagaatgtaatcctgccttcatggaattctgcctgggccacacctccgctcctcagaacaagtggagttgagagccttggttgacaggctcaacaggtggatgcttccctctgttaagatgatcagtcttgatctgggggtgtattagttcattcttgcatggctataaagaaatccctgaaactgggtaatttgtaaagaaaagagctttaattggctcatggttcttcaggctgtacgagaagggtgatgttggcatcttctcgacttctgggggggcctcaggaaagttgccatcatggcagaaggcaaagggaaagcaggcttgtcctatgtgaccagagcaggaacaagagacacgggggaggtgctacacacttttaaacaaccaggtcttaggagaactcgctatcatgatgatagcacctttggtgtcatttctcctggtgttaaaccataagaaagcacccccatgatccaatcacctcccatcaggccccacctccagcctggggattacattttaacatgagatttgggtggggacagtgatccagaccatatcagggggcaaggaaggtgatggtgctctcacttcttatatcgatccaagagctagccaatgagtgcctactatgcatgtgctctgtgctaagcactggccatacagcagtgagtgctttcatggtgcagtggggttaaattcagataataaaatgcatgcacaaataaacaagagcaatgtcagaaagcaatccaagcaatgcagataattaaaacagggtgatgtgatggtatgtgactggaagttactttcaactgggtgttgaggtgacgtttaaattagagatgagataagacttggcaagcatgtgtcttgctggccttatttcctccctctctggatgttagctcttcctggtctcctatgttgggggaaggcttccagatctttgagcctctctgagcctctctgagcctggcatgtgggtccagctgactgttgactttccctatgttttgttttatttatttatttatttatttatttttatttatttttttttttgagatggagtcttgctctgtcgccaggctggagtgctgtggtgcaatctcagctcactgcaacctccacctcctgggttcaagcaattcccctgcttcagcctcccaagtagctgagactacaggtacatgctaccacgccccactaattttttgtattttagtatagacggggtttcaccatgttggccaggatggtcttgatctcctgacctcgtgatccacccacctcagcctcccaaagtgctgggattacaggcgtgagccactgctcctggccctttccctctgttttgtaagggtttaccccacaaggctatgtaagaagaaagcagcatatactacgaggttccctaagatttagcccagttttggggtggttgctaacacacaggaaacaagagtgaacaataaaagaagcactaatgagttcctaaatcaggtgatgcttgttaagttccattgccctgcttccccaatactttcgagttttgtaaggccgaagcagaaatgactgggagacaccatagattggagcacaattctgtatgaggattgccagttgacacaccctccagagaatataatgtgaatatagcatttggctattttttacactttaagattctttagtgtggaggtgtgtgtgtgggggtggggtggcgggggggcgctgtccgatgagacagctctaagaggtctgacatcttcctttgagcaagtaaaaaattgttaagagaagaaggtggaatgggggcttacctgggaatcttctaggtttatgtagtatattagtttgctaggcctgccataactatcacagattggttcatgcaaacaagagaaatgtattttctcacaattctggagtctagaagtctgagattaaggtgttggcagggttggtttcttctgaggcctcttgccttggtttgcagatgactgtcttctccctgagtcttcaccgtggtcttctctctgtgtttgtctgtgccctgatatcttcttataaggacaccagtcatactgaccaaacaacctctttttaacttaattacttatttaaagaccctgtttccaaatgcagtcatgttgtgagacactgaagattaggtattcaatatatgaatttggggtgtgtgtgtgggggtgggggagcaattcagccccttcaagtctaggaagctttcaggtaccagggcctctgtcgctctgaaaggcaccaatctaagtatttcaaaaatatggagaatcctaatttgaggagagaaggtattagggatggaggtcattatgaaggaaggaggattcaagttttaaagatggaaaggatgtggatatgtagaggaggaagaggcaagcattggaggggaagtgtgggagcagggtggttaggaagaaagatccagagttggaagtgagcattgtgtgtttatggagcaataaagaaatctttgtgacaaaaataacctacttatattcagagagtcatggggaatcagtgggctaggacagctggatatattatgtctaggtcctttcatgtcaactgggaaagagtagaactaatagggtaggaaatagggagctattaatgttgttggggggaaataaatgaaataatagatgcgatgtctaaagatgaattcataagagatttcaggatggtttggaggaaggagtcaggcaggccagagacaaggctgttccaaccatctggacgtgaaataattgggatctcaaattcaaatgcctgcagaagaaggcaagggatgcagatgatggggtggggggtctttcttagcctgaaaagcagatgtccattcctgcagctggtgggatgaacagcccttgtaccagtcagtgctctctggggaaacagaacccatggaatataagtttgcgatcctaaaggcaggctggcaggctggaaactcaggcaggatttctatactacagtcttgaggcagaattcctccttgtctggcaaacctgtttttgctcttaagaccttcagctggttggatgaggcccacggacattatagaacgtcatctcctttacttagtcagctggttgtagatattaatcaggtctacaaaataccttcatagcaatatccagaccggtgtttgaccaaacagctaggcaccacaacctagccaggttggcatacaaaatttaaccgtcatggtccccaggcaggaaggtgtggaccacactggggccttgccctgttcccagagactctgcacagccccactcccttcctcctataccagcatagtgagaggcaggggatggcagctgtgccttggtcctggatctgatgtgagccgacagcttattcccagtgcatatgcccatatgagaattaactcgaaggagaataaactgttcccttttgagacctggcccagggtactctactctgatgccaacagcatgtcttgttgtttcttccttagctgatccttactggcagggggcctcaagatcactgaagcttttagattcgagcatgaagtcaggagtttcctcctgcatgcctttctgatggcaagggagctgtactgtagtagctatgtttgtggtctttggtgtcagggactgggctcaaagcccagagtctcatgggctatggtcatgaccttggggaagcctcttatcttctttgtgtctcagtttccccatctgtcaaatggggatgcaataattgtatgtacttcagagatgtgagagattgaatatggtgatgcaggaatcacttagcacagtggatgagagtgcgtttcaccagttttggcttttctagactcagttgagctgggtctggtggctcatgtctgtaatcccagcactttcggaggctgatgtgggaggattgcttgagcccaggagtttgaaatcagcctggacaacatagtgagaccccatctcttaaaaaaaaaattaggtaggcatggtggctcatgcctgtagtcccagctactcaagaggctgaggtgggaggattatttgagcctgggagactgaggctgcagtgagctgtgatcatgctactgccctctagcctgtgtgacagagtgaagccctgtctcaaaataaataaaataaataaataaacaaacagatagttgactgcagtttcctgaccccttgaagtcaggtgcggccatatgcctttctttggcaaatgacatgcaagcaaaaagtgatgtgcatctctcttgggtagatgatttaaaagccagaagtgatttgccacattcctttcccctgtggcagagacagtgagcgcacccgtgctgagacagagctgccagccaagggcccagagtaagtaagtaatcagagcccccacccctctgcattggccctgtagactgcaccagaagtaaacttctgctgtgttgtaagcactgagatattggggttgttagcactacctcaacccaactgatggccacactttagatgtgcaggaaatggtagctgttatgatttttttctcttccttttgtcttctctctcagaggttctgagcaatgatgtgaccgatggtgtcatccgagtcatctgtagcaaatgctacttttggatctatcacctcggcatatggggaatcctgtctgtacagctgatattccacctctacccttctcttgccctatcattttgagagggaagaattgggattaaacactagagttttatcactcattttcctttgcaaaccttaccttgcttatctgtgaaatggatgtgagagccttgtttctatcttttccaggacttattgtatgattggtccatgtatagcaagtattatatacatccctcagaaattactattactgggttttcttgtctaccttttttcccccattcagcacatgatggtcaattttttgtttctttccccccaggatcttggaaacaaagacctcaacagggataaaatttacttgatttgtcaaatagtccgggtcggcaagatggatcttaaggatactggtgcaaagaagtgcacgcagggactgaggaggccctttggggtggcaggtaaggggcacactctgcatcattgatttttatgggagcgcacattttatgtggctgaattgtaatgatgatttgtttcccaaccgcctcctgctgcccccacccctgcaaaatttatgccagacagcccttaataactacatttctggtgactaaatcaaaataattggtgactaagtccagatttatgatgaacacagtgaatcatgggctcctcttgtctggagtagagcatcgggagaccggggccgtctgagcagttgacacctttgctccccagctctgtgaaaaaggaaaaacaatacaggcaggatctaattatgaggagcaaatcatttaaaaagtacatctaggacaggaaatgcagttacacagaatgagtcacctaccacacatctaaattccagatggaaacggacatttggagaattggcgtgacctgaggcagagccctgcatgaggctgctgtacagcaacatcagctctgcattcctcttaagctttagctctcctggggtttctaaggcttcgtcattcttgccccacttttatggttttagttatgtttgactaccacttgtactgttatttaccaaatatagtttcttttaatcaacctgctttacataatgtatgtttttcatcaaaggcgatttaaattcctgtgaaaatggcaatttgatatgccagttttctttttattaaaatataaaattttaagagtataccgtgcataacccctatgtaccatagctaacctcagtgtttcaggtttctcacttcaagatgctctgatctgtaatcgcagacctgcttactctccaactagtcccctggcactgcttgcaaagcggtggagtggaggatgttttactgagctcactgttttttttttttttttaacctggcactgcggctagctagccagccagtgatattgggcaagcattttccccagagccttagttttattatgtgcaaaatgaaggactcatacctggttaattcatgaaatcctctactgctctaaaatgctctgattctacttgtgggggcatttctgacatcatggtgtttctgttaaggcagtaaggatccttcaaccttactgcaaagtgtgtctttgtcctcagctgtagcctgccctctcttttggtgtcagatgacagaaatctgatctaaactggtagaagaaggaaaagaaaaggtactttattggtgtaactgaagagcttatgaatagatcgcttcaggcatagctggatccaggaactcaaatcagtttgtctctttcttgctcccatgtcctcatgctggcttactatgaagaatttgtctctttcttgctcagcccctatgtcttcatgctggcttactaagaagatggctgtccaactagttggcaaattatcagccagctgttccaagcttgcatcctaccaacttagcaaccagtggaaagaatgtacctctttcccattagtttcagcagaagccccaggagctttaatataggtcacgtcctcatctccatagtctttactctgggcagggagagatgattatctgatctaccaggtcctatgaataactttggagccaaagggaaattgccctgccctaatcacagccctgaggatggatgaggagagtcagttagagagaatggatgctcggtttctcctcctgtctgctctctgactcccctctctatctagatgcagtcagtggttgattattacccaagcaattttaatggcccctgcccagtgcctggagtgtttgacgtattttctgtaactagggtatgagcttgattggagtagcttttctcagccctctcctacactcccacttctataatccccattctagtgtaggagttctttaccttggttttgggacctttagtggctgatttaaggaaaggtttcagaggatccaggatacctctggaatcacaggatttgaggattcttcagttatgtatctgtacatatgagtatgcttatgaaaagagggtggatatttcatgagattctcagatcctacagagacccaatcactgctgtctggttttgtaggcatggtagacattcaatacatgcatgtcaaatccaaacctaattgctgaattccacagccacggctctgaccctttccttttggcctctgctaagccatggtgctcttggatgcctccctggccctctgacctcccagtctgctttgcctggaggtatttgccctggtgctgcacgcgaggaacctctgctgtctgagtgttgtgcagcactggcttgcttgccattttaggccttcctgacccccaggcatcccaggctctacctcctgtcccataagctcatcccactgtcatcccttatgggaacaggaagaagttaaaccattaattcattctgtcttctttctagttatggatataacagacatcatcaaggggaaagcagagagtgatgaagaaaagcagcacttcattccttttcacccgtaagacatttcccatttctttccattctcttcaaccacaccctttgtcatcaagggctgctggagctcagagggtaccagttccctgagttagtgataggcaggtggagcctcccaagggaagctcagggtgagaatcactggctcagtgcccaggcactcaaaaccaaacagctcttcagccattcattcatcagatgttatttatgccacagacatttattggtggcctggcagaggctggcactgtgctaggtgtggaggatgaagtagtgaacaagatgggccctgtcttcatggagctcatagtatagatggggaattaaacagataatcaacaaaagattaatgcattaattacaagtgcagcagaaaccacgaagctgtgaagcagcagcatttcaggagcgtgtggcagggaatcctaacctggttctcatggatagacgtatccatgacttaggaggagggcaataagggaggtcaatgtcctctcctctcctgttccaaaaggagtcttccagaaagcagggctccagtttgagagcatcatcagtacttaatagccctaaggatggtccaggtaatgaggctagtgactttgctgaaggcgtgtgataacgacttagcaggagcaactcaagtctttacccttgctaagcagatatgcatgttgaaagctttggaatcctacctttataagcatcttcctggagaataagaaatggcctctacctgtagcattgatattcccaaatttcagagccacattgctttgtgataaaaagtgaggtacctcttgatggcatgtatataccctgggctgacatatgcaaactcacttttcacctgaggcgtgtggaggggctggggagattcatgggaccccttgaaacgcaaggaggacacgatgtggacatttcatgctctcttttcctttccagggttacagctgagaatgacttcctacacagcctgctgggcaaagtcatagcctccaagggggacagtggagggcaaggtaaagtgccaatatgccagtgggctgagcctgctccagcttgggagcccctaactcttcagcaaatgaatcaaaatcctgaaccctgggatacttagctttccttccagacagaccactgggaagaatgggaacatatgatctacagggataagtcacattttctgaagaaaattggaggcatgtcctggtgcccaaaagcagagaggaattgatacatcctgaatatctccggtgttccgggggcactttaataagttaccttgtttgatttcattcttaatccaggcctgagagataggtgttgtcatcctcactttgggcttagagaagtgggataatttgccagaggctgacaccgctagaaatcattagcgggattcagacccagagatcgcctgttccagaggccctgtgggctgggtggctgcatctgtggctgtatgactctgttcccagtgatctccagaaagacagaggggagaggtggcgggagggccgactgaggggtcacttgcaaaagtgggctcttcacggtgagctgttcctttgcaggcctctgggtgaccatgaagatgctggtgggtgacatcattcagattcgcaaggactatccacacctggtggacaggaccaccgtggtggccaggaagctgggattcccagagatcatcatgccaggtgagacacagctgctctgaccttcccctggggacataggggccaattcagcttgtctaattcattttccttctaaagagtcaactccttccttttttactgcctctctccatttctgtccctgaaggtaaccactaaaaatgatgtctgtatatccaaaaacttctatgcattaacaaaatagacacaagcatgtaaatataaacacataccccttctccccacaaatggggtcatattttatattcctttacttaatatactttatatagtattctacaacttgtttttatcacttaataatttattgtggccatcatttatattttatacatgcagaacagttgcactctttctgggagaatattgtcattctcttatatttttaagctttttttttttatattaccaaaggaatttgtgttcattgtaaaatattcaaatggcctgaaaaggtataaagtgaaatgttaaaagttcctttatatctttgtctccagaagtagccactacatttccaaatgtgtgtataattttaaaaaatgagtttatataatattaaacaaaaattataggagggcattgttttggactaagttcctgcaccagcccccaacaaaccagactgaaaatcaaaatggagtcagctatgctaaagggtcatgtcatcaaacctaaactaaactgttatctgatcttgcaagaaattcggagaggggagagagggcggcgggcgggggcagggagagagagagagagagaaagaaaggaaggaacgaaagaaaagacaagaaaaagaaggagagaaagaaagaaagaaagaaagaaagagaaacagcctattttccagacaggccattttcaattttcaatgggcatgataatgaagttcctgaagtaacctgatgttaacaatcagtcacttttctatttttctgtttccctgtttcagccttatgagggctataactttgaaataaccaattcactctgtcttgcttctacttccttcaggccttctctgtctataaagccaacctcttctgctcagctctttggaatactgattctattttatggaatgaagcattgcccgattctagaattgcaatagagccaagtgaggtcttcaaactaaatttgttgtaattttgtcttttgacaatggtaatactcttttgaaacttctctttgtgtcttaaacctgtgtcttggacttccgttcacgatggctctcactgacttgctgtttctttccacatttgtctggcggttgtctcctagggcctgtgctgtcatttatttgtccatgctttacctgagacttcagttacttgtgtaaccccttgtaggattttctattcctttttttttttctttttgtttttttgagatggggtttagctctgttacttaggctggagtgcagagtacagtggtttgacctcagctcactgcagcctctgcctcccaggctcaagcaatcctcctacctcagcctcctgagcagttgggaccacaggcatgtgccaccacactcggctaatttttttgtattttttgatacagacagggttttgccatgtttcccaggctggttttgaactcctgagatcaggcgatctgcccgctttggcctcccaaagtgctgggattacaggcatgagctacctgtgtctggcagattttctatttttcttacctcccttcctgaagatcctctgcagctccctcctaaccctgtgtccctaggacacatggaaagttgctctattctgctcctacacagtgaaatatcggcagatgtatatgtttggttgttttcaagggacaggatcaattcaattggagctttcctttgccttcccagaaggtgtcactagaggatgaaaattaaatgatttttaatgtcgagaaaaacatggccaattttgagtgtccctacttccctttttgcaactgatttcctagcatcccttcatccccgtgttacctacttctccagcctccctgatgagggaaaaatgctttctctaagcaattctgattttaattaataccaatccaggtgggagagcttcttctcaccctccatcccctctagttagtcagcgtctctcctgctgtaatccacactaactcttgtctctctctccctctgcctcaggggatgtcaggaacgacatctacattactctcttacaaggtgactttgacaagtacaacaagaccacacagaggaatgtggaagtcatcatgtgtgtgtgcgcggaggatggcaagacgctgcctgtaagggactcactgctgctctgggtgacagggtccgccttgggggcctctgcttgtaaagacgtacttttcctctccctgattctgttgtctaaatgccaggtgcctttgggatggtgttgaataatgtgttcaacaccttttgagcttggttagtgcagtgttccataataagaccttgtgatatttccttacaccaaagcagtttttcaatgtctgttcctttcctttcacaacttcttcttgtatgtatgtatgtatgtatgtatgtatttatttatttatttacttttgcttggtctcagcttataggttagctttctgcagttaaaatgttctcactgaaacctgagctggtttattcaggcaaagtccatggtaagaaagaggatcaatacagtgccttgggctggtgtggaggctcaggatgtgctcaaagcaggcattctcaacacttaatctaactccccagcgctcagccagaaatgctggtggaaagccttattcgtaaattggtctccagagagctagcagggtgtattcaggaatgcaaagcgcattgctatatttatacagcatatgtcctgtccaatatttgtcatgtgtgtttatatttatttgcttgtattttctttaaggttgtcagtgctgtgtccagtgtgtaggagggttttgtttctcagttcctcctgacagagtagttagctgaaaagaaaatcagctctcaggagaaattttagcatgggcgaatattcctcttaggccactgtgagtgatcaaatagccaagcagggcgggtgtgttcatcagagaggggatgtgaagatggaagaggcatcagttttgtccttggggcctggagatcagactgatactttgtacccaagaataactaacattcacaggggaattaccatgtgtcaggctgtgtgatagtatgacacatttcctttattatgccccattttacagatagggaaacaaaacccgtgtcacttacagtaactcgcccaaagccataatgttagcatatgtcagagatggggtttgactggttccaggccctctgagacacttcactacaatgcccgtacatgtagcaaaattctccaatttatttctcattttaaaaaatgaggctaataaccactgctggcaaatttgggaagattcataatcgttttttaaatgtaaagaaatcctcacaattgcctttttgttcataaagactggtcatgttaattagtatctatttgaacaaaatctaagcattgaacgcatcctccttttgttgcagtctgaaactttttccaaaaaataaaataagtgagaaatacttgactcaaaggaacataaaggagcggagggtttttatctgaaagggaaattgcaattcccaaatgtagagaccattgctttgaagttacttttatccaacttccctggtagagaactttttaacctcagcttcatttttgaaacattgatacgcttaccttccatgttgccaaaggacaaattaaaagacacagttaacaggcaagcagccatcttatctcctgtctgagccactctttcttccacttttgtcaccctttcaagtcactaccgagcaggctgagcagatgcacttatccaagatgagtagataagcaggtattctgggggctgacatggaaagggaactgtggggcatggtgatgatttgtggtttcctctattagggaaattctgggggagttcagttgactgactattgaaaattgcttaggaagcctgtgggaggcttttctttctctatttgtagaaataaatattactgcctaattaagtgtcagtcagtacattcaaacacttctgtttgatattggtgggctcctgtggaaatggtcccctttagaaatattgatttctcctcctgctctaggtgcatgcacactgtctttggcagagcaggaccagagggcagaggaggttaggcctgctcatggctcaccttggggtgtcaagggccttgctcaggaggggtcatagcagagaagctaatggggtgggctctggggtcaggcagacagggttcaaattccagcctcccctcatattagctgtgtgatcttaggcaagtttattcatgtgtaaaaagaaataataacctcttctcgtggggttgcaggttaaacaaaagagtaggtattaaaacaactaaaagagtatgattggattgtttataacacaaaggataaatgcttgaggacatggatccccatcttccatgatgtgatttttatgcattgtatgcctctatcaaaacatctcatttactccatatatatgtgtgtgtgtgtgtgtgtgtgtgtgtgtgtgtatgtgtgtgtgtgtgtgtatgtgtatgcacacactatgtgcccacaaaaattaaaaattttaaaattaaaaaattttaaaaataaacatgctgctgggcacagcggctcacacctgtaatcccagcactttgggaggccaaggggggcagatcacttgaggtcaggagtttgagaccagcctggccaagaaggtgaaaccttgtctttactgaaaatacaaaaattagctgagtgtggtggcaagcacctgtaatcccagctactcaggaggctgaggcacgagaattgcttgaaccctggaggcagaggttgcagtgagctgagatcgcaccccagccactccagcctggccgacaaagtgagaccctttctcaacaaacagacaaaacacgccataggtataaggcacctggtattgcagtaagtacccagcaacaggaaggagggtcacattcagagaagaggaccaagtgcagggtgaagccctctgagggacctgagggagtcaaacaggcaatccagccagaagcaaattctggtgaaagagaaaggcttagatgctgggccaagaaacctctgtttttctgagaccacccaacttgaggcggtggaggcaggggataggggaagtatgggatagtggttaagaccatgacccctggggccagacagccaggtgcaaagcccagctctgcctgaattagtaagaggatgttgaggcagttacataacctctctaagcctgagagtctctgtctgaaaataggaccagcaatggcactttgctcttgtgaatatcagatgaggtaatctacataataggtgtgcattaaatttagctattattattagaagggtatactgagctcccagcctgattcctaccttaggcatgctaatcgacatcccatgatgtggtcttgtgagaggagaacactgtctttcctaaagtgtgttcacatccctggtgtcatctctttctcacctgattcctaccaagtaaacaggacatgtgttaggagcctggtttttcttcctgcagagatgtttcttctaaggccaagccaacatgaaagcctccaggcttcctgatccatactcagattttcttcaactgacctgaagtctcccacacctatgaggggctctcactgttaattgggggccatggggataggcaatgtagaaaattatggaacagtgttatttgagatatataccagtgtatattttccctagaactgggctcagtccctggtcacaatgctctctcagtgcacttcccaacactgttatttctctgaagtgctgaggcctatggcactatctttggcttttctctgactggtactgagacttttttctccagccttaggaaatcaaaaattttcatcatcagtacagttttgtgagatccagttgcctgccatgcggcagttttactttcaccagagatatatgtgtagtttctgatttggtaagctacatgggatttactgtaactacagaaactctaagcccataaatgtcaacagatataaatctttgtaggctggaaggcatctaggttcttatagaaggaacactggatgagtatttagagggtctgtgatgttgtcctggctttgccactttttgggcaagtggtttaatctctcagggactcaggtcacccagctgtgaaatggggatgctgacagtaagcatcagaggtggctatgaggactgaattaagcgaggtggtgtgtgtgcagggcttagcgtgatgctggacacaaagcccactctaaatggttagaaagactttggaagcatgtttttagctcagtgcctcgggaagttctggaaggcttcatcccatggaaaaacaaggagagctgtgtgtcttcactcagttctggttcattggttacacttgtttttcttttaaagatacattctgaaaggactgctgtgtattctgttttcaaatggatcgatttggctgcaagtactgtcagtcaatattgaaactgagctcattccttttccatacctcggaagcacaaggggagatttccagtgtgaagggcgagtcttcctttccccaggttagcatggttggccagggctcacggagtgcctgtatgtggccagctttggtgattcagcctgctgaaggtcaaggacccacgggagaatctgattgaatctcatgagaggcatgactcgctcaccatcaacatgccgagaggcacacagtttgcaatttcaggggctggggctccaaaaccaaatcttatgaatctggcaatttgaggattgaaaattgtttggcctaatataaaaaccacacttcgggccccttctgggtaatcctagcttggatcttgtttgggggccaaacggctggaatgaccatagaagtaggcattgttgtatgtgaccaggaggtcattccttgtgagtcagctcctttctgaacctctgagggtgatttttatggcaaggaataaatgtcccacttggacatgtgtgctctgtgctcactctctgctcagaaagcccctcccacatttctgctgtgtgccaacttggaaactttcttcaagattctcaactgtcattgcctccaacaaatcttccctgattcctcacctgtccttgtgtccttcctctgtgcccaacagtagtgtgtacacatgtctgtcatcacgttgccttgctgtcatgacgtgttccctaatgtttcctgcacaaaactgtgagctcacgtcaggttcaatgtctgacccattcctataccccagtgcacagcatggagtaccaagaagatgtttccattattgtgacctgaactgagcctcctccccggaaccccctcaccccagacttgttctttaaggcaggtgctcatgtgtctctctgaagcctgtgctctctccttttgtccagcactgcccaccgccctgacgtgttagctgtagaaattcatcgcaaagagttgctgcttggctgatctgagcctgttagtaaactttctgcacattcacatttaggaaacaaataggattaataagactggcagtgtgcagtaactccaaggctggttgtcacttacagtaaggcagccacatcaatgccctggtgcactccagtggtttccagaatggaagtaatggaatttctgtagttaagtgcctgtcagtcctgtggctggggcactcctgtgtaaatctgtaatagagaaggagccattatgggcacctggcatgagggctagggaaggcagggttggcccaggccctaaggctggtcgtggcctagggaccaaacctgcacaagcacagaaaatgacaattctgtagtcttttccctcactttgtttttcttgggtcagaatgcaatttgcgtgggagcaggggacaagcccatgaatgagtatcgctccgttgtgtactatcaagtcaaacagccacgctggatggaaacagtcaaggtaataattaataatagcagcaaacacatgtctagttcttaccatgaaccaggcactgttttaagtgctttatttaaataatttatgtattgcttacaacagccgtgtgaggtttgtactaatatttccttcattttatagttgaggaaactggcactgaacagggaagtagcctgaccacgaccacgctgctaggaaatatcagagctgggattcaaacctgagcagtctggctctgggtctgtgctcatccccgcaagctgagggagcagaatactgactggaacaattagcattcttctttttttttttttttgagacagagtctcactctgttgcccaggctggagtgtagttttaccatctctgctcactgcaaccactgtctcccgggttctagtgattctcctgtctcagccccctgagtagttgggattacaagcgtgtgccaccacaccaggctaatttttgtgtttttagtagaaatggggtttcaccttgtaggccaggctggtctcaaactcctgatctcaagtgatctgcccaccttggcctcccaaagtactgggattatgggcatgagccaccacacccagccttcttccttttaatgagagcagttgagcaaggcagttctgtgcatagaccctaggcccagagagtctgggttcgtattccagccctaatgctcaccaatggtgtgaccttgggcaagtcattcacctgctctgtgccctggtttcctcacctgtaaaatgggagcaataggttgactgtggaagtaaaaggacttaatacacataatactgtcagacaagtccttggaagagagtacttattcaattaatacaactcttgattatacttggcagttatctcagtctgcaaaattgaactagattttgcattccttcaagatgcccttcaaacacttgacccttgcctgttttttaaccacccctctacaggcagtctaattggtagtggcaggcagctttgtgcctctctgtgtagttgtggggagaaggcagagggaaggtatagttgttccagatatctgttgcagtctccctccaggtccttctcatatggcatctccccgcaaaatgttttgtggaatactaagtggtgttttattaaaataacgttttaggccaggtgcagtggctcatgcctgtaatcccagcactacgagaggctgaggcaggtggatgacctgaggtcacgagctcgagaccagcctgggcaacatggtgaaactctgtctctactaaaaataaatacatacatacatacataaataaatgagtcgtgcatggtggcatgtgcctatagttccagctactcaggaggctgaggcatgacaatcacttgaacctgggaggcggaggttgcagtgagctgagattgcaccactgcactccagcctaggtgacagtgcgagactccttctcagaaaaaaaaaaattcatacgttaaatgtattaaaataacatttcctggtcaaatgtgagaaacttgagaacaaatatagaagttaaaggcttccttatgtcaagttcttagagcccttgagatgtaaatgtgctctgcagacctgcaaaaggaaataagaatgcagagcacgtcccaaaactcgttgactaccgagcattttcctttttcctagtgtcatatcctggggctaggattctgttgaacatattttagaaattctttgttttagccaaagcaggtgggaggcttgatggatcaatgtgattgtgaacaacatatgagaatatattatgtttctcttcatgaaatatctaactcaattctgaggccagtcatgaacatactggagggacatagagtgacagaaaaacttctttagctctagtttatagcagaagtcaccatctgtaagagcttagggtccttggaggcacctctctgaatctgaaatgaccccctagcatgtgtctggtggtattgtcagccagtggaaatggaggccaggtgggtgagcaccctggttcccttgatcacccttccttggtgcaggatgtaaccaaagtggaattgtcaaatagtcctcttgtgggtggtgcccagttcatcaagctgcaccattctactcagcaatgaggagtgacagagcttgcaagccaatgtgagcctatcacaggctgtataatgcctgaaagatgcccttttggaataattccttgacagaagtgacattaactacaaatattacattaccagatcgtcacactaagcagaaaggaataacctgcattggaataaggatttggaattaattcagtgaacactgcagcttgatcatagcttcagatatctctgccttatcattagcagcattctttattccccccgggctctgactccaaacacaagatgcacacatgacttccttttcagtgagagctattcaaaccccagcggttctccacttattacacatattattactttgctcagtgtgtctccccatacccaatgccttcaaattgatgacccggtcaactctgtggtcagaaagttaatgtaccaggtcaggtttcccttctctgttctctcttgcacctcagttgtatctccttgctagcccttgtcacagggctgttacacattgccccgtgtgtaacacggaacaatgagctctttgagtgtgaggactctgccttgtatcagcatggccagcaccccacatgattgtagcttctagtgaacattcaacactcagggaaaggatgaattggctgcagttacccatgagaccctcagttcctttgctctgcctgaaacatagacaggatggtggacctcctcaggctcgagcctcattttctgcaacagaaagtgcccccaagtatacatttgttttggcgtttaataggcatctgtacagtacaaatgtattcctttttaaaatcagtgtccttctctcaggtagctaaccttctccgcattggcctgaatctcagattgcagaggagctgtgagactttgggaggtgggcagcacagagccaggctgaaagcatcacaatcagtggtaccagtgggtcattcactggacagggatgcctgggtgaccagtgggttgttgtcttagctcagtgtccttggaatcaaaaacatctggacatgtgtctgatcaagggtgagatgagccctaggatttttccaaatattattggattaaagcatttttattaatttgcataaatgagattcctcaagcaaaccccctaacaaccattgttaatttgctaagccctgctgcaattgccagaactcctggagtgtgtaaggaaaatgtgcattgtgcagtttgcagtgcatcaaatcctgtgctaaagttatgtgacttttatatcaatttggggagactcatttttcctcactataatttacagacctcttttcattggctgggaatgcaatttgccaaatggattacatttggtactttattttctcttcatagctagttcttctgtaatttatttacagttcatcagcctcaatggatgggttgtaaatcagcaggcagctctctcagttaaatggtcaggctgctgtggaagtgtgtaggggggtgcagtggggagggccctttaactcattgtgttctgagctctgtttctgtctgctgaggtggctgtccctattgaagacatgcagaggatccatctgcgattcatgtttcgacatcggtcatctctggaatgtgagtaccatactgaatggcatctctgcacctccccctaaggggagaagaatggaagagctgggtggcccatgtatcattttctttcctgaccccacaatgctatttccagctaaagataaaggagaaaagaactttgccatgtcctatgtgaagctgatgaaagaagatgggactactctacacgatggattccatgacttagttgtcctcaaggtaccatgagttggaaggagctctgcactgaggggagtgcaggaagaaagggggtgatggcaaaattgcttagtggtcaacagcagggaccccagaatcacacacaccagagtttaccaactttgtggcctcttataaactcttgacttctctgggcctctgtttcctcatctttgtgccctcagtgaatatttgtgaaaattatgagacagtggatgtaaacatagcaatgatgagtacatggaagaactcaatacatggaaaaggttattgttatttacagaaaggttattgttaatgactgttatatactcttgactctgtagggacctctgtggcatgtgtagaggatgtacaataaacatttgagagatgctgcattgtagctaatgggaaaatattaaaacctgcagtcctgatcctgctgctgactaagcctggactcatctcacatattttcctgagtctcagtttcttttttcttaagcagttgtggcaatatttatgacaacccactaggatgacccatgaaaaatggccatctaaactataaagggagtgcagatgtccactatttttatttttacattatgagacttggactgtttttgagacatggaggagcatttgtctggtttttacctgctgcttttccacatgtcctcttatgacaacagaatgcatctactagcacctggctggaggcaagtgtatggctgtgaggtggagcaaggttgagtagccagcacatggatcacacccttgcccttggctttcttagccttgtaggctgaaattgcccttttgcctgtgggatgcatggcaaacacagcctcgtcaaggcttcatctcatagtactcttgtactcttctctgagtctctctgacttttccagaaaaccccctttcttctgtacagcctctgttttctcatttatcacacatagaattcttggcttgaaagcccttcttccctgacagaatgtgaactccttggggtcagaggcctagttgcagtcaattttcttttacttacccccattaggtcccagtttccttgactgaggataataacagtgtctgcttcatatgtttgttatgaggcttaaatgaaatgaaccaagacatataaaacacttggtttcactcctggtgcggagtaagataaatgttatcttctgtaatgcctacctctagtcattcattttaacatgccactcatttatgtgtgtatcactctgctatgtattctatatgcattattccatattatctgctcaggtattctaggaagtagggatgatgattgtcttcagtttactaatgaaaaaaaaaatgagacacaaagaggcaaaatagtgtattcaagatagcatagacctgtgaatggcaaaacagggtccagatcccagcacactcttacttagtgcctttgccattaaattcctctttaagctagagtccttattttgctggtgagcagatattatggtctcaaaaaaaggatgaattaaaatgtactgtctgggaattttcaattccgtttttattttgccattaatgaggttcacagagctttcacctggtggatcaaccccctttctattaatgtgtctttgaattcttacctgtattgtggaaaaacagtcctgcctcaccagccaatgtctattgcttctctgatgattttcttcactctttatgactctccccacttcacagtgtctaatttgtctgctgcaggctctgtgtggcattgggcatggagccttggcttggggcagtaaccaagtgttgtttccagggggacagcaagaagatggaggatgccagcgcatacctgacccttccttcttatcgacaccatgtggaaaacaagggggccacgctgagcaggagctccagcagtgttggggggctttctgtcagctcccgggatgtgttctccatttccaccctggtgtgctccacaaagctcactcagaatggtaatcgggtcatcaagagttgtgtctgtggggagtgtgtgtgtccgtgtgtgtgtacatgtgtgtatgtgcttgcagacccaaggaggtcctgatatggacagttaggccagtaatgatacttctgaatgtctggactctattttagtgggcttgctgggtttgctgaagtggcgtatgaagcctcaactgctacaggagaatttagaaaagttgaagattgtggatggagaggaagtggtgaaggtcagtggggcttcattttgattgtattcttacactagtgacagaactctccatgtgggtggcttcaggggaaaaacaaggtattgaaggacatggggaaacttttcttccaacagtaggatacactctcccgagttgccttgaggaatctttattgggaaatccaggggagtgacttggttcaatggcactgaatgttgggtgccagaaaacaatggttatgctcaatctctggaaatagatgagcctgggtgtaaatcccagctctcccacatgccaactttatgtgataatataaaagtgacatagttctcagggctgttatgagcattcaaggtgataatatttaaaacttactcaacagtctcttacacatagtacacaacaattaaaccaaagcatataaaacaaagttcaataaatggtaattattatttttgttgtcatatgttgatatatatgtatatgcatatatatgtatgtatgtgtgtgagcatatatatgtgtgcatatgtatatatacatatatatatagtagtatgatctgttagtactacccacagatcattgttagaaataaaaagtattcttggtttctgctgcttggagagcattatgtattaaagacgggaaagggaaagacatcagggcttacattttaagtgaaataagcagaaaacaatgcaaatgtcagatgtattattgcatccacatggtagtggagaatagaaagcgtctgaagtgcaaatctaattaaagcaacccttctctccagccttatgaattgggacaagtgtttcccaatggtcctggagatcttgtttccttgatacagctagaaattctgagattaaacatctttatatggtagctctgtgttttgagggattataggaaatattgacccatcccttaggagggaggaaaatcaagttttatttaattgcctctacctggagaagcagtggcagaatttccagatgccgtaaatgtataccactgacccatctacctcgttcagcaatggcagagtaactccccaagacaccactttaataaagtctatagccttttggtagcttggagaagtcatggaagagatgaggcttttgttgtcttcctcttgcattcttttttctttttttttttttaaaaaagtttgttatttaaatatgatatacatatgatgaaatagatacagagcagttatcttaagagtatagcataatggatttttacacacgtaaacaccatgtgtactcaccacccagaagaggatacagaccacttttagcattatagtagattccctcataccccttctcagccagtagtcccccggggtaatcactgtcctgacaaccatcattgtagatgggtttttgcctactctcaaatttcataagaatggaatagtgaagagtgtactttctgtgcctgatgtattttactgcatataatgcttgtgagaatcatcctcatttctgcctgtggaagtagtttgcactttagtccagctgtgtagtattctctagtgtgaacatgccaccatctgtgcatccattctgctgttgatgggcagttgggttcctccaacttctggctctcgtgagtaaaactactctagacgttttgagcatgacatgtggtggatgtgtgctctcattctcttatagatagttaggagtgggattgctggttcacctgtactttgtcttgtttctgaagtagtgcaacctttgttatttcttccagtttctccaggatactctggatgccctcttcaacatcatgatggagcattctcaaagtgatgaatatgacatcctcgtctttgatgccttggtaagagagaggggaaaagtgtctagtgacaacaggcattaatgtatgtcttactgtgaaaatactgagaactcatggccctcatggccctcatggcctttttcatgaattctttggaggtgttgtaatgtttggcaacaagaccaataatgagctgctatttccttttgcttcttgccagttcatttgaaagcatgaggcattgtgggtgaaaggggaattttaaatgctgatgtcagattgacactggctgaaggtacatgaggctggatattgtgaatgattgcttctgctttctatgaatgttgggagctagtccctggctaggttgtaaagcaccaaaaatgtttcttagctttcctttcaccttcttctccccatttcctccaactcactaatcattacatttctcctacccacccagaacttttcatgatgctgtaccatccagatcttccttcttttagtcctcccctatggtctttttgtcctctccctatctcgactcagattttctcagtgttatgtcaaaataaacacaagaaacatctgcattagggaatcagtgcccaacaaagtttttaagtgttaaccccttgtgtcatggatatttgcatttttaaagaggttactgagagacaactgtggcttaatcaagtgcttccccagagagtaccctagaatgctagctctcagaaaagatgtttcatgacaaatatatactttgattaattaatttagggaagtgttgaatgttgcatgacccttttagagattcacaatgtacataagtatattaaagattctaaaaagttttgcaataagaaagtctaataatgataacctgacatttctcaaaacctatttgaccatgaaatccttttcatcttataacaccccacagcacacttcatgaaacattttctttgggaagatgctaccttaataaagagaactcattatgtattagtgagctaattcctgggcaaaggattttaatgggggttgaattatgccaggtaaagatggcttcctgccctgggtttgccctgaaaatactgctgccttgcatcttcctcagatttacataataggactcattgcagaccggaaatttcagcatttcaacaccgttctggaggcttacatccaacagcatttcagtgcgaccttggcttacaagtaagtaattgtgcacatgggaacttcttctctaccaccctcttgccctgccaggatgcctagggcacaggaacttgagtaattttcttttgtgactcatctgtgtgagctctccattctctaacaaaatctaacctatgcttgggttatttggatatcattaaaaatgtggaatacccataggtttggatgaatgccttatggttgcagtggtacctggaagtgctcattcatccattcagctagcgtgctctcatttcttgagtggacaccaggacttaaaggctacagagaagaccaggtgtggtggctcacgcctgtaatcccaggactttgggaggctgagataggtggatcacctgaggtcaggagttggagaccagcctggccaacatggtgaaaccctgtctctactaaaaatacaaaaattagctgagcatggtggtgggagcctgtaatcccagctactcgggaggctgaggcaggagaatcacttgaaccctggaggtggagattgcattgtgcagagatcacaccactgcactccagcctgggtgacagtaagactcatctcaaacaaaacaaaacaaaacaaaacaaaaacagcgggggagctacacagaagaaagtgcacatgccaagtagctcagtctggtttgggtgtagggagagggtgagagataggagatgatgccacagggagtttggtggggaccagtttgtgaaggggccttgaaagtcaggccaagtaatttgaagtctgccctatggtaaagaagaaacatagaaagttcctaagcaaacttagagttctgtgatattacaagagcatgttctatagaaagaaaaagttgaaaaaaaagacattattgccaccattattccccattattcccacttgtagcctgattgtgactagttctcctagtcaaaagatttttttttcctccctatctttttctttgctggctttttatgagcaggaaatacttattaattccctgtaataaatataatttttatgcagagttatctttatgcttacaaatgagtaagtgagcttggctctactaccacctttaacctttgattgaatgccttataatttactgagcaaactaattaccatgatgaaagagatgtattttgaaaatattatcccttattcaggaaattgatgacagtgctgaagacttacttggatacctccagcagaggggagcaatgtgagccaatcctaagaacgctgaaggctttggaatatgtgttcaagttcattgttcggtcgaggacattattttcacagtgagtacttgttatgtaagagtgattgattagctctgcaattcctctgggatacaacagtatttttactgtaggagaaactcgtttaaaaaattataaccagctgtcgatcaaaaacagctcaagaatccaacctagagagtaatgaatatgtaataattgtaccctctaagttcatttgggaaaaaaaagaaatcttaacaggttgcagagttatgtttaaccagtaaatgtgatttgaggctcttctgtgtttcatctaacattcttcatttgatttgaaatatggtgaacattttccagcaatctatatccaatgttagagggcctgggagcaggaagggcagaactcagggagtctgacatttacttggctcttgtaggttgtacatggccaataagctggtatttgcagttgacctgtctgtccttgagatcctagtagccaaaaagtgagctgatgtattagagtaccttagaagattttgatggtcagtatcacagaggccagctgcctttttgaagggctttggagaggaaggtattcaaatgcaatttatagaagaacaattcatgttcatcttggccatagggcaaagttaggtagaggattgtttgtgtgtaatcaggttggttgtgtgtgatggaaaataagaaaaacattcaaggaaagtattgtctggattcttagtgcaaacaaagaacacgcaactgaaactgacttagggagaaatgagactttatttcacatcattgaaaaaccaagggtgtagtcggcctcaggcatggctgagtccagatgctcagcgttattgggatagtctctgtctgtctagatctggactctgctttctttttgttgattgtcttataaggcaagttttccgacgcagaggctgctagaatcctcaagtttacattctaccagtggaagcaactctatgttccttgttgtcctagcaaaaccctatgccaagaactgttttgggtcttgtatagttgtggtcatgtgtgcattactggagtcatggccaggtcagccacttatggtgtggacttgttattttagagatgagttctcaaaagaaacttgaattagcctgggcaacaaagcaagactctgactcttaaaaaaaaaaaaaagaccatcattgtgattgtgatcatgacaatggatgggctgctaaagctttatatttgacagtgcatctgaaacaggcaatcatttgggattctcttaacacattctttgagatttcaggttatgaatagaaagatgtgagtgtcttgaaccatgcgacagaacaaatgcacttaggtcattctgaaagtgaagtgtctgtttcagattcctctggcttgtcatttagtcaagtctgagtcgggtattctaggtttgagagatacttctcagtgatttgggaaaaccaatgagactccagtgaatctaagagtgattttcttggaggagttcaagaattcagacattgcagttacagcttaaaagtcaaggatatcttatcccatcttccaagtgagaatgttttatgtataagtagaatatgtcttttctacttctcagaccttttcagttcttccttttggtgtatttattttattgcttctcctctctcctatatttctttccttttccatcccttcctccctccctttcttccttccttccttccattttttccttccattttcaaggattgagcttctttacaaagcctcttgcagtgcctgaagctcagacaaccagctgcgctaatcctcaagggttctgagcttgtggaattatacagagtttggagcaggctgagcttccctgttccatgagatggacactgagcggctccccttcctactggaaggcacatggagatgagactgcagagcttctgttaagataactctcttatttatttattaattttgagacagagtcttgctctgtcactagagcaatggcgcaatcacggctagagggcaatggcacaatcatggctcactgcgatctccgcctcccaccttcaactgattctcctgcctcagcctcccaagtagttgggattacaggcacgcatcaccacacccagctaattttttagtagagacggggtttcaccatgttggccaggatggtcttgatctcctgatctcgtgatctgcccacctcggcctcccaaagtgctgggattacaggcgtgagccactgcgcccagccagtataactctctcatgtcttacgtctgttagtttttgtgttttccatctactgggacaaaatacatttgtgcatttgttttgctcttctctgcctcaaggcatataatcttgcagaacccctaactctttaactggtgtaaattcagtgctgctgtgacgtaaatgctaagtgacttttggcttattcaggagcagggtgatctgttattccttgctgtatccctagaatagcagcacatcactgacatttggtcaggagaggtctctaaagcaacccaagcctaatcttgaatccttcctcatgaacagaaatgtaggctgacctgcaaagacggtctaggacctcatgctaggagaaggtaggttttgtgtcttgttctttttagaatctttagcaatgatctgctctccagtggagtctctagggcattgggaagctattggggtatttctccatacgagggggcatcttctgtgggaaactagaaaacagaagtttcaatgctttgagatgtctaacccagctgttgggaaatcagaatcgaattattggtttggggctaattgtatctggtattgtgtgtctgtttcctgtgaatcctttattctctttccctgcttgcataactgcagcggatctagctcccattatttgttcccttgccattattttttgcacatcctgcccaggaacacttgcaagggctaaggattttcctgtgtcagtatgcaacgtatagttgggtaaggaaagaagagtcgttgtggagaaggggtggaatttttattttactatattgttcagaaggattcatttttatctatagccaaagaaagaagagagtgagttccttgtccctcgcttcttgtgtcactagctcctgagtcaaagtctggatcaagtgtctctgattaggcacatgccagtgctgtagctgcaaaggaagctggcagagcaggttctagcttctgccacagggaggcagtcttatgagtaattcctaaattataggaagtgtgtctgaaagatgctggtggccataaatatgtccaatatccactaggcttttgtagaatgactgagctcctgggaggtattgagcattgtaaggaacattcagaaagagttgaagtgataatcttctacgattcagcttctttacaaagccccttgcagtgcctttaatcctgaagctcagacaaccagctgtgcagatgcccaaggtttctgagcttgtggaattacacaaagtttggagcagaccatgcttccctgttccatgtgatggacactaagcagctccctgtcctactggcaggcacagagaatcagactgcagagttaggataactctctaaaagggagaggaaccagaacactgtgctgcaacaggagttgctcccacttgtctctgctcctcacagatcctcatgctgccccaggctagagtgcaaggggcagcatggagtaagagttatgaggagatgttcatgcaggacagacaatgggtatagtggtatctctgcctctataagtacctgggttagtgattgaatcagcctctctgagcctcagcatcctcatctataaatggggataaaccagttcattgtgtttcaatgatgaaatgagattatgggtacaaagtgctccatgcaatatctggtacttatttcataaatttaataaatgttagctggtatcatgttttcacttaggagaaacagcaagggtgcttttttcaaaaactcagatttaaattattaagaagaaattccagggtcttgattcaagcttaaaatttgacttactactcatactatcctaaacatttcttacagtttatttctctggaggcagggataacttttaccaggtgtctgtgctttttgaggaccacaatgtggtactctcctggccccaggaattcacgctggtctactgctagccctcactgggtggtcctgattctgtgtgttgctcttatttcctctgtgagtgtgatcaggcccctctggccagagcagctgtggtgcccgggtctctggcccctgcttgctatgcctgcttttctttgcatcctgccttctgctcttattacagacctgcttatttgggtcttgcttccttccccatctccatttaaccccgatctcctgcttccacaaactcctccttcaccagccccagctccagctcatttgcttatgagaaactgccagctcagaggtgaaaggcacagtctccaaagccaagtctgcttgggtgtgaattctgagttggaatcttgccattacatttactagcatttacaaccttggacaaattatttaatctgcctaaagctcaatttcctcatatgtaacacggtcataatagtacctaccatacagggttggtgtacagactaagtgagcccaatggatgtaaggtacttacttagcacagtgctggtcacatagccagtatacatggttattcacttatcatcttcagcagtcttcacaaaaattctacggaggaccccattttctgactttatctcctgctactcctcactcactttgtgccaaccacactggacttgctgtggctcaagctccttccttccttgaagacctttgcacccttccccagatccatttgttaactccctcaccatttttatatctttgctcaaacctctctttcactaccctatttaaaattgcaacccctgtcccgagcactgctgatttctctcttccttttgatgtctttttctccccatagaactaaacatggcatactatatagtaatcatgcttttgttgactgtcccttccttgctggaatgtcagatccatcagtacaggaacctttgactgttttgtactctgtggtacactaaagcaactagaatgtagtaagcactcattaagtatgaaattggacaccatttctagccccctttcacaaagaaggagactgaggcttagagtcaagctcaatgatcacacagctaagaaatatagcagagtgaggctttgcactctgcctcatctgatgaagcaaatgtgagaacctgatcatttttctgggccatgcaaatgtgaagtctggctggccatgttgaggggctgtcctgagggagggcgactctgactggaggggctgacgtactgagtgacattaggggctgctgagaggcacatggctccttgggtttcagtgctaggaagcatggtaacatccctaagtgcagtaggaattctgcaaacaacaacaacaagatgagctggagcaggagtggtcaggaaaggcatccttgctgttatagtgaagctattcaggcaaatgtgactttgtcttcatccccagggaatgaataaagaaaagttgacacagggcaggccaggtgagctcacactccttgggaacaagtcactggttggggagagaaaaattgcactctgtgtcctgatgggagcttcagcacctggaagcttcatcctgctccctacccccgagagccgagaaagcctgccctggtgtgcacagttccactggcctgcactggagctgccaccacattaacaagggcatctcaggagcatggttcgcagctcagcgacgcctccagtctagcttacctcacccagggccagacgtgattgccctttctctaattgccttcagcatcaatgaccagaccccagacaccggctttctggtactttcttttgtcttttttttttttttcttatttgcctatttatttattccgtgccaccctaccaatcaacctccaccttatcccctcccaccagctcagtttcttcctatgtaaatattgcatagtagtttaccctctaggtcatgaatatgttaggcagcaagattgtctgaataaagctcagggcaagtcagtgtagcttgcagtcggagggagcacataagcctctgccttttgaaacaaatatgaatttaactcagaggtgcttgccagtgtgatttgtttttattgttcatgtatgaataaatattaaaatgtaatcatctgtttatgccgagcatgagctgaaatgcctgtgacattgagattcctgtttcttctgcgtgtaatttgtttgcatattaatgccatttatttctgtgtaagcctctgtttttggttttgaatataatttcactttttgaagacagtaatggcttagtaaactgaacaattgcagttaatggaactattttatgatagcattaacttggcgtcagatcaggatgaaagagaaaactgtcaccgaaaggatatcatcaaacagtgacttctctttattatttattttatgaattgctgcagtactcagggaaagctaaacagcctttctcatgaacatatgtgaaagtggtttgtcaactgttaagtaagttgcctgattataacatgaaattgtgcatatgcatgagctgttttttctttttatttatttatttatttattatttttcttttttaaaattatatcttaagttctagggtacatgtgcacaaagtgcacatttgttacataggtatacatgtgccatgttggtttgctgcacccatcagctcatcatttacattaggtatttctcctaatgctattcctcccccagcccccaacccccgacaggccccggtgtgtgatgttccccaccatgtgtccatgtgttctcattgttcacctctcacctatgagtgagaacatgcggtgtttggttttctctccttgcgatagtttgcttagaatgatggtttccagcttcattcatgtccctgcaaaggacatgaactcatccttttttatggctgcatagtattccatggtgtatatgtgccacatttttaaatccagtctatcattgatggacatttgggttggttccaagtctttgctattgtgaatagtgctgcaataaaaaatacatgtgcatgtgtctttatagcagcatgatttataatcctttgggtacatacccagtaatgggatccctgggtcaaatggtgtttctggttctagatccttgaggaatcgccacactgtcttccacaatgattgaactaatttacactcccaccaagagtgtaaaagtgttcctatttctccacatcctctccagcatctgttgtttcctgactttttaatgatcgccattctaactggtgtgagatggtatctcattgtggttttgatttgcatttccctaatgaccagtgataatgagcatttttttcatgtttgttggctgcataaatgtcttcttttgagaagtgtctgtttatatactttgcccactttttgatggggttgtttgattttttcttgtaaatttgtttaagttctttgtagattctgcatattagccctttgtcagataggaagattgtaaaaattttctcccgttctgtaggttgcctgttcactctgatggtagtttcttttgctgtgcagaagctctttagtttaattagatcccatttgtctattttggctttttttgccattgcttttggtgttttagtcatgaagtcttatgcatgaacttttaaatagttctctgttccctttgcctatggaaatattagtaaatatttattgggcacctattatgtgctaggcactttgttaagtcatggggaccctgaaattagtaagtcagccttcctcaagtattggcaatgtagtggacaagataaacatgcatcccagcaatcaaatcacagttgcctgggataagcaatgatcagtgatgcaatatcacagtggaggcctggaaattgttcttgtgggagcagacagatttgaatgacaaaccttaccttgggaggatcagtaattcttctcagaggaggtgatgtttcaaactagacattgaaatgtatttaagaagccaggctagccaggtgcggtggctactggagaggctgaggtgaaagaattgcttgaactggggggtggaggttgcagtgagctgagatcgtgccactgcactccagtctgagtgatagagtgcgaccctgtctcaaaaaaaaaaaaaagaaaaaagaaagaaagaaaagaaaaggagccagtccatgggacgaaagagactctctaattctaaatacaatctgtgaaatagaacttccaatgactcctgcttctcttcagtatcatttatgaagcctctcctctgtgcttggccctgcattgctttttactccacctcacttaatacaacaacgctgcaaagcataggtattatgatgttcattatataaaagagaaaatgaggctcagaaaggtacagaaagtgactccaggtcacactctagatgtcggcggggagggatctgacactcaagctgaggttcttgctgttgtgctgtacccacacacgaatgtcatgtttgtggagaagagtagctagtgaatgaagccgtggtggtggaggggggcctgatgcatctggagaggtggcttgaagctgaattgtgaaacaccttgaatgtcagacccagcagcttgacgtcatcctgtatccagggggattttgatgtagatcctaccttttactcttagagagcacacagtgagtgccccagtaggtgtacacactaagctattgggatcagataaaactattaaaattattttatctcacatgaagacattaaacttataaacacttaatttagactagcagatggatatcatttataaataaataagcatctattgagttttgtgcttaaaatgaaaaaaaaaatttttttctccaaggagcagtttggaaacttctgcttttggcggtggggagccactgaagttctaaagcaggggattaacatgattagattcatcttttggatagagtactggggaagaaaggttagttcgtggaagatgagatagaaagcaagagatggagacgggtgatcaatggtgaagctatcacaataatccaggcaagagctcttgaactaaggtagtgacggtggtactggggaagaggagaggaagaagataaaggtttacagatgaggagatggccagaactaattgaatgtaggagtggaattcaaggagagggccaagccagatgatctgactctggactttctggtccatttgacctggcattgcaaaccagcatgagaaatacaggggagtagtgggtttttatagtgtattgggtttgggacataaaatgtttgaggtgtttattggcagaaccggatgaaaatgtatagcaggcagttagatacagattaggagttcaggagaatggagacacagttttggttgaaattgatccaaagagatatttgaagctatagcacaaggtgagtaatactataaaactcagaatgaaacccagggagtcagcccattgaagggatgggtgaaaaaagggtcccactgaaagctggattagggacataggataacaggcagaaaggattgtcattccaggaaccaggaaggacagtgtttcaaggagggagtgtcggcagtgtcaggtgctacagggagatcatgggactggaaactgattagaggcatgatattttgcaatagaaggtcattgttaagttagccaaccctttcccagagcttagcatctttcctaatatctggtccaaaggccatcagagcaaggggtcaaagtttgaagtgcatttgatttcctcttatctgtttgtgaattacctacatttggattgcctttttccagggtgtaatcctagactgacttcccccatccatccttcagaatctggggaaaatttcatacttcactcatagcaaagcgtaagacactggtcttgtctgcttccacctccctttaaatggtgtggaatgaggctatcctgtgctgtagacaattaagggtaaggctgtggaggacacagatattcattcttttaggttgaaatggtaaactatttcctctgattgttaactcattattggaaatctgggagctagattgctggttgaacccttgcctgagagcaaagatggctatttctgtcaaatgctgaggctgacagttgctcagagaatgacttgggtgggagagcaatttactgaataaacgtgtagatttagaaactgcatttgcaaatcccctgtaacgaaatatgaacataccggataagaagggtctagtttgccagaagggtgaaatttgccatgctaacgcaattgtcagggatgctaagtgcaattggtatgactagacgtactttgtgatcttcgtcaaatgtacttgaggcaggcatcaccccgaaggagaatttgtttccttagtagaaaataatatattgctcactcattgggcttgttatttattgtgtctttggggtggaaggaagattgaaaaggacttcatcatgtggcacatatggtcactgtccttcaagtctctaaactggcccctctacctggcagatctactctcccacatacaggagagacatatagcctgctacagagacacattgatttcattcattcatttgtgtattcaatagtcacttttgagtcttactatttggccaagttctatgctaggagactctagtgaaaaagacagatggagtgtcttcttcatgctgcccttatattatactgggggagatggaaaaacatagagaaatgaataaaccaagttgtttcaaatggtaataaatgtcagtgaaggaataagcaagtgtgtggctgagacaggggtagtgagggtggggggtagcagagtgcagggtatagcacagtggtgaggctctggagccacactgcctgggtttgaatcccagtaactgtgaccttgggcaaagtcacttcacctctgggtcttagtttcctggtctaaagtggggattacctcagaatgttattgtgagggttctgaaaatgtgatatttatttatttatatttatattttggaggtggagtctcactctgttgcccaggctggagtgcaatggcacaatctcgactcactgcagcctctgcctcctgggttcaagtgattctcctgcctcagcctcccgagtagctgggactacaggcatgcaccaccacacccagctaatttttgtatttttagtagagatggggttttgccatgttgaccaggctggtcttgaactcctgacctcagcttatctgcctgcctcagcctcccaaagtgctgggattacaggcatgagccactgctcctggccctgtaaactgagatgtgatagatgcaaatgaatcagccatgcgatggctggatgggagaaggaggtgcagggaggaaagctatgagcaagtgctctcacagggtgaagcttttcagaaagttagagaagactggtgctgggggatgtaaggtgagcataggggagaacaggagaaagatgaatttggacagcgagtcagaggctaccatgcagggattattctaggcacattgcaaactgctcagaggggatttaactaaaaacgcttgtatggcaggtagcacgtataatacttgggtgacaagaagggtttgtgtcatggaccacacgtgtgtcgtaacctctacaagtctctttagttacctcacttaagatatataggacataaactgtccattctttaatcatgctagatggaggatggacatcctgtgtttcctcaaatcagtgaacaatccctagagttctagcaatcgctcaactcccttaagcatttttgttctacagtcaccacacttactatttttaagagccatttatgtttcagccaccatgaatttttggttacagttttgaacaagtttattttttaattttaggtatatgattatagctaccactctctctctctctcttttttttagagacaaggtcttgctctgttgcacaggctgaagtacagtggcatgatcacagctcactgtagccttgaactcctgggctcaagtgatcctcctgttttggcctcccaagtagctaggactaatgcccagctaatttttaaatttttttgtggagatgcagtctcactgtgttgctgaggctggtcttgaacttctggcctcaagtgatcctcccacctcagtctcccaaaatgctgagagtacaggtgtgagccaccacacccagccttgccacttctcaatgctgtgttaatgtatcggtctaaagaccctgatatggtttggctgtgtccacacccaaatctcatcttgaattgtaactcccacaattcccatgtgtcctgggaggagccctatgggaggtgattgaattacaggggtgggtcttttctgtgctgttctcatgatagtgaatgagtctcatgagatctgatggttttaaaaactgtagttttcctgcacaagctccctctttgcctgctgccatccgtgtaaaacgtgagttgcttctccttgcctttccccgtgattgtgaggcttccccagacacatggaatgtaagtccattaaacctctttcttttgtaaatggcctagtctcggctatgtctttatcagcaacacgaaaacggactaatacagacccttattcctcaaagtaacagatgctataaaagccatttgatgtgattattagcagtcattgtgcccaggtacattcttgtacacaagtgtattttcctcagaataaggttcttccaaagtataatttgctgggctaaagggtattaattatttttttcctgagttcctatcagatggacattctttggggaagggcaaacttgcatgtcttgagtgccataggagtgataaaatgaagagcttgcctatatttggggcctggtgtggtggctcatgcctgtaatcttgcactttgggaggctgaggtgggaggatcacctgagctcaggagtttgagactagcctgggcaacatggtgaaaccccatctctactaaaactacaaaaattagtctggcatggtggcacagcctgaagtcccagctactcgggaagctgaggcaggagaatcacttcaacccgggaggcagaagttgcagtgagccgagattgcaccactgcactccagcctgggtgacagagtgagaccccatcttaaaacaaaacaaaaaacaataaccatattttgtgaataagccacaggtgataatactatcatgctaataattaagaataccctaaatagcatgagccacagcattttattctgctgacctctgtctcttcctggaatcacttttcttcccttggctcactaacacagaactctttttgtattcctcataccgttattttctctctggaggtcctaaatgctttttggtgtcctcctttcactcgcttcccactccctagctgaatgcatccacgcccgttgcttcagttatcatttctatgcaggtaacacagaaatccagcctcacctcttcaccaagttccagatccatatatccaatcacttgatatcttcttttctagtatatcaaaggcaactcaaagttagcacatcgggaatcaaattcatgatgtgctctatctcactgacccacaaaccagtatgcagcgtgagacagaaaagagggactcattcttgacacctcattctgttactccacatatggtccacagtcaagtctcaaacctttctccctgaaacgtatctcaatttatctatatctttccatctttactgctaacctcctactccatgttctcaccctctcacatgtggaatactgtatttgctttctccagtggtcttgctatatccattcttgccttcctacagtctattctctataaaggtttttggatttcctaaatagacaattatagcatctataaatatagaacattttgtacctccctttctaatcttaattctttttctccctgtcttactgtacgggctaggagtctaggtcagtgttgaatagaaatggtaatacatattgtgctttggatatttattgtagatgcttttcatcagtttaaggaagtcaataattatgtctgttatgaagagataagaggtttaattgtgatgactgatgttttgaattcatttctaccattttagctgtgcatcctccacaccaccccctgatttttctgtcctttttctccctttctttttttgggattgttttcaatttcctcattcccttttttcccctttattagtttgaaagttacattctgtgtttaattatattagtggctacctgcatattttatcatacatatttaacttagtaaagtctaaagttacatttttaacatttccctgagtaataagatttcagaaggctctgtcacctccttcttaaatatcatgctagaattatgcagcattttagttttactttctaaaaataactccacatactagatattattattgttttaaacagttagtatttatgtttttaccaataaaagttcaacactattctactgtatacttaaaaatgattaagatggtaaattttatgttatatgtttttaaccacaattaaaaaaaagctcatcactctttctcttatcttagacatttcatatttgcttactttctttctgaagttaatcttgtagacttaactttaagaaattctgttggtaaaatccctgaaattaaattatctgattttattctgaaactcgaaaggaagtttttctagatatagacttatagctcattttttgtttactgtcatctactgttaatgttaactgttagtcttactattgtttctttataggcattctggttttatctctctggtggcttgtaagatcatctctttctctttgatgttctgcagtttcaccatgatgtacttaggaatgattttgttgatgttgctaaaagttagttttcctggatttgaagttttgaatatttaataccaattccaaaaaaactattattcttgcttttttaaatattcacatttctccatatattttattatctctctgaaatatcaatcagcatatgttagacctcattatattctctagttctcataaattctctttcatattttctatcttttttgttttctcggttcattctgcctaatttctttaaacccattttccagcttaccaagttctctctttagctttgtctaatatgttctttaactgactgaggtttttctttcaattacaatattattttcaaaaactccattttgttctttttcaaatctaattttttgtttttataatattttgtttcttgatcatattttcaagcatctttttaatgttttgaagcatagtgagtgtgctgggtttgtacactttgttgcataattccagtagtgggaatctttgtgggttctcattctgtctctctgttttgggtgaccctgcttctttatgcattttgttgtttttattatttcctaaagctaattgtccttggaacttcatcagttggtatatattttaattaaagttttttattttcctccaaagaaaatcagagtttccttctttcattcacctggggcaataccaaccagatacctcattagttaaaatttctgtttatggatacaagcaaggaacatgaattggaaaacaaaaacaaaacacaggtcaggactgacttgtggttaagaattctcactggagatatgtttgcgtttttcttctacatacagcatcgaagaccagggcatttccttcctgtttccttttgtgcaataggtttatttcttttcctctattttgaagaagatgcaacaaactgggaaaccagctttatatgagggtctccaatatgcaggccctaggattgatctcatttcttctattccccaggcagccatcaaaatagaactttaaggacacgagggcttgcagacgcctttggggcaaagctggctgcattgctctgacgtacccagagacctgctttgctttgtgtttgtcctcggtgtattccttactttcttgacagtttagtgacttatatttaaaatccagctttggtagttgttttcactgacaggttttccaggatattttgttcaccatactgtcagaaatggaagtctttaaacttcaccctacagtcagagtgatctttccacagttcaaatcagatcacagtactcaccttcttaaaatcctcttatttctttttattcttcttaggatgaagacaaaacctaatgtggcctgcaagggtctcctggtctggccctgtagcccctctggtcccctttgacctgacttccctaggtgaaaggagaagtctttctccactctggaattggtggctttcattcagctcctctgattctctcagctcccttctgctgtggggcctgtgcacttgctgttccttcaacctgaactgctcttccctctccttcttacctaattttctcttatttatctttcctgtgtcctctcaagcatcactttctcagggaatctatccctgtattttctggctaggtcaaagctccctattttaccttttcattgcccacgtattttgtgtttgaagtacatatcacagtttctgttttacatgtatagacgtcagtttttatttatttgtataaattccttaattgcacagtgactggtgcatagtagatgctcagcaccgtcattggcacaataacaaaaacacatttttgttagttgaataacttatcttatggagaccctaagcacacctactttagccaagtaaaagctgccggtattagtctgttctcaattgctataaagaactacctgagcctgggtaatttatgaagaaaagagtaagtttaatggactcaacacttccacaggctgtacaggaagcatggctgggaggcttcaggaaacttacaaacatggcagaaggtgaaggggaagcaagcatgccttagcatggcagagcaggggggagagggagagagagagagagagagagggagagagagagtgagagagaaccaagtgggaagtactacacacttttaaacaaccagatcttatgagaactcactcactgtcatgagaacagcaagaagggaatctgcccccatgatccaatcatctctcgccaggtccctcccccaacattgtaaattacaatttgacaggagatttgggcggggatgtggaaccaaaccatatcacagcccttctcctagaattgagagtccatgatttttgagtttttatttctttcacccctcgtggcttgcttcctggggtaaagtgatgggtcttttcactggtttcaggccaggtatgcacagctgggtcagcagggtctggtagctgaaatgcagccctggattttaaagctcacctgtttgggtcaggggccttcttcttttatcaacttttcctcctctgatatgttttaatgtaatattctagtgcctctccattgcagtaagtgttagaatgtgacctctcctaaaccctagaagtccacacagggtgtgttaaatgccctgcactggtttgcaccccagcctttgtctgctgtgtgcattgcatgcccagattttctacctgggcttttgtcatggtgttcccactttggaaggcatctgtgggtttctcagcctggaatataaagatggtgaacaatttttcagtatatgggtatttcttaacttttaacaaattgctcttaaagcctgtagcttccaaaacacctttaactcaggatttattcatccttacattcagcaacaatgcatcacatacctgtcccatgcatactgggccataaaacttagtttctttttttaagcacatgagtagataatgaaagtttctatctcaaaataagttcaaatacgtgtctagtggtagaactttggtttgcattagtaatcacatgtttatccaacacatatcgagtaggccactatgctaggtactagaaatataacaatgaactggacagactagtggaattagacaaaggtatgaaagtttttagtgtagttgagaagagacatgaagcagataatcatgtgggtgcatgtaaaatcaaggggaaatgcatgtgaggtgccctgggatcatgctatgaagagatcagctttcatcacagggtcaggaatacttctctgaggaagtaccatctaagctgtgacctgaatgatgagtaggagttggcaggtgaagaggaggagggtgtagtaggtgaaaataaagccagagggagctccctgagataggagggagtttgacccaaaggaactgtggaaagtctagggtggctggaattcagtgaccaagggatagaatgactggacattgcctaaaagggtaggaaggggtggctcttgaagaaccttgagtgtcaggccatgacctctagaaattatcttagggaaatggggagctgtgatattatgaagtgtatacttggtctttgatcctttttcctggcatacatgtcctagaatccttagaatctccaaaaagtgatgtctttttgcatgctaatgagttgactgaagcctggaaacccttaggtagtttcaggatgaggggtggccatctgaaagagcaaggcagaattagagggttgagactttcagcctcccccatagggaggggagagggttgaagttaacttgatcaccaatggccaatgctacataacaaagcctatataaaatcacaaaaggactgggttctgagagaacccagcaattccagacagctgaacacgtggcacttcctggaaggtggcattcctggaccgggcatggaagctccgcataccttcctccccattcctgtatcttttgtaataaataccctttatatcaaataggtaaatgtgtttccctgagttctgtgagcagctctagcaagttaatcaaacccgaggagggagttttgggaactcaaattaatagccagttggtcagaggcacaggtaaaacaacctgggcttatgattggcattggaaatggggggcagtcctggggactgagccctcacccaatgggatctgactctctccaggtagataatgttgggtttggactgaattagaggacaccagctgtgtccactgcagaattcattgcttgcttggtggtggggatagactctcgcacatttgttacagatgtcttctgtgttcatggttgcggcatgggagcagagggaaagtagcgtgtgttttttccacttaggaatttttaaaggattttcaacaggaaaatgctatgatcgcatctgtgtttttagaaaggtccctctgaccattatgtagaaactggattgaaagaaaataagagagagggaagggacactggttcagagacccccacaggtgagaggaaatggaggcttggtcctccatggtactgatgaagatggagaggggtaaatggcttttggggtggaattaatgggtcttgatgactcaataactttcaagcaattcaagatagtcccttcttagcccaaggctttgacttgggcaccagtggggcctttaggctgtgcttggaaactagagggtgtttttttattgtccaaaaacaggcttggttttggacaatacatgttctgaaatagatagtaatgttcattttcaactcaggtgcttaaaaaagaagctaagtcttatgggccagtatgtatggaacatgtatgtaacgtgttattgctgaacgtaaggaagaactctttgacaatagaagccagataagaatcctggagaattacctcaatggtaaatagtttacctaaagatgaggacacaagggcccagacaggagtgatctaaagtctgaatgtctgtaaatgctagtctggtttagaattcactcagtcctgtgaccgataccattgctccttctgttaccctgtcctctgcgggcagcctggtgggcccttggtcatcctactgctcaaagaggtctccaggcactcaaacctcagtgtgtttgatctccacattccttgggtgttcccaaatttcaaaacaaagagttttattgcacatgcatttttaaaactggcaccattagcaaggaaaatgttaaaagaagaaatcacttaactacacacaccaaatgtcagggctctcagtggaagagcctggggttaattatccttttcaggaagccatggaatcaaaggatgaagttcaatgctcttggcatgaccatagtttagagtaataataacttggcatttcttgggccgttgtgtctctagctgcagtttatgccagaaactgggaggcaggtgaaaaatcagcatcttgattctgtaattgtagagggaaaatggcctctagttgtatgtgaccttcagttagattctccagccccagccttattcccacatgagaatgagaaatttcaggaaaggctttggagaaatggactgttgtaggaaggagctataaggcaagaaatacaccaaagaaagagtagatctctctttttaaagttaaatgaaaatttcacttgtgtttaaaaatcagaatataaaataagtgtatataatgggcatgttatacctaatccccttttccaagaggtagctaaattatcaatttaatgtacagatttgcagattttattagctttgcacgtgtgtctgcgtaatcatctggcaagccatttttttctgttatatattttcaattatatagaaacctcctagattgtaaacaaacaaataaaaacactgagggaacaaatgataaaagaagtggtcaaaatccaacttcttcttggcacccagacttttataccaactgggccatagagaaagagctggaaggagtgtgctgaatattagctgctttttcaagtagatgatgtaatctatatatttctctgtatgtcttggaagcagggaagaaagaaagagagatagagagtgtgcatgcgtgtgcttctttctatccttaggaatattgttttggaaacattcaatttctaattatattggggggaaaaaccctaaataccatttttcatgctaatggagaaatttacttaagtgcagaattatgcaacttagttttctcgccaaattacataaagtgtgcagctcctctgaatagaatgaaggatggcatgggcacacatcacacactgttcataacttaaagttcttttcaggctttttcctgcatcttattacctacttactattaatttattacacagggttgccatattttaaaagtaaagtgaatgtttcagatggattgtttttctttcatttctcccatattgttaacttcttttttttttatttagaactgtttatacttccatcagaggcagtttttcttcagtgattgcattaatttttatgtgttcattctagacatttttcaaacagaatctccacatgttgagtttgtcttcttttctctcatccacaaatcattctttcctggtgttatttacaggaagatgttagtgaatctcctttgctatttgccctaaggagtgatcccaccccaaatgtcaggctctggaaaagtaacagctcaatagaaataatctcgtcattgacaaaagtacttggcaccaggagctgatctgcaccccgcctgttggctgctgggggtattcaatgaagtaaagcctgcacaggcacctctgtggcctctagggctgcttgacagttgacactagcaacactgtagtcatcctaaccgttccttacatattctgtttctcatgaggctttgctctttctcttctgacagaataaatatttccacttcaactttgttaccctttagaggagaatttctctgaccactgtgtatgtgttttgtttttgtttttgtttttggagacagggtctcattgtgtcacctaggctggagtgcagtggcttgattatggctcactgcaaccttgacttcctgggctcgggcgatcctccagcctcagcctcccaaatagctttaaccacaggcatgcaccaccacacctagctaatttttgtatttttttgtggagacattttcccaggttggtcttgaactcctaggctcaagtgatcctcccatttcggcctcccaaagtgttgggattataggtgtgagccactgcacccagccatctgaccattgctgagtaagacagctaactctcagattctgtgtctttgcaatttcttatttatttcaggtccatacaccttgatggtggggaagaggtggggatggtggcagtgaccttacagggaagggatgaattaggaagggaaccgtctctttcacgaatcctttgcatgcctatttcattgacttaaatgtgcctgcctagtgcattgaagggtctcattctatgaacaggattgggaagtgcaaggatgatcttcagacagactcagccactggtttagctgtaattattcttggtcccaggttgtggggtgggagggagagagggagagaatacacatcactccttgactcttgtcttaaagtattatgattttcccagagtaatcactcttttgaaaccaggaaagattcaatggttctttttgtaaagtcactaatttacacttatctgaatagggcaaattattggctcaggggaaggaacaccagccaagtcaccttggttttagagcttgaatagaaaaagcttagagccagccttctagcttccctccaacagtcccatagcgtcatcccctggataacggatgcctccctacccactgacttgctcttgttcctggggtcataaattatttagctgccacttatctcccaggatcttttactatttttttttttttttttttttttgagacggagtctcgctctgtctcccaggctggagtgcagtggtgcgatctcagcttaccgcaagctctgcctcccgggttcacgccatcctcctgcctcagcctcccaagtagctgagactacaggcgcccaccaccctgcccagctaattttttaaatattttttttatagtagagatggagtttcaccgtgttagccaggatggtctcaatctcctgacctcgtgatctgcccatctcggcctcccaaagtgctgggattacaggtgtgagccactgcgcccagcccttttactcatttttatctgcagtgtggtgcctggcatgtagtaagtgctcagtaaatggtagttgtctttatgaagatgctgatttctttcttcttacagttcaggaagcaaaaatgggtgtatccggaagaaaaactgtatatgatgtaatagtagctgacatctgttgttgactatgtactagactctgctaatggctttatgtgcattgtttgattttcgagcaaccttatggggctaatacaattttactaatgagaaatctgagtctcagagagattaggtaccttagccaaggtcacccaactaataagcgacagagcaaggctaggaacccaggcagtgctgcctaaacttctctattgcttcgaagagtcagagaaggaatcggagggatggatgcctataaatgtggaagtgactgaggtacagaaaataaaagagggtcagggtgttaggaggctctccctccacccctgattctcaagggaatcttcccacttgctttctgcatcctgaggttgctttggttagattctgctcccctgggatgctagcctgaggttggcatctcagttttgggctgaggctttatgtacctgcgtgaaagaggtggtacagagcattgtacacaacatatggggctccatttgcatttagtgagtgctcagctgtgcacagtgtctccttaatgaatcacatgcaagccgagcatcgctatatttatccaagccctgggagccggagtgctggctgtggtcgacttgcatgccccagaacagtgccttgcaggttgttccagttttccttgtggtcagggccttagggcccttcaataatttgttccctggcaaaatctgctggtttctgaagtatctttccaggcgttctaggccagaaaaaatgtttacatcctgaagctgtaacagagatcaagcgctaaaaaagaacctggaagctacatctgctgtgcccttgacttcaaggccacatctgaagaatcgcagacagatgaggcatttttattttcttttcaagcttttcaagggggggtcccacaatgcttaatgcttaatcaccctgctgtcatcaggttatttcttccttgtaatctaaaacccttatgaatttttttccttagtcactccttaattgaaatatttctttttatagctgggcattggtggcttgtgcctgtcatcccagctactcaggaggctgaggctggaggatcacttgagtctgggagtttgaggccagcttgggcaacatattgagaccctgtatcttacaaaatattcctcttatgctcagatcagagagtttgcccaaataatcacttctgtgcttaggaatcaagaacaagaatttataatgtttacttaacgctgattaaatgccagctacaatattaagcacttaaaaataattatctcatgtttttcacctcaaaataaccatttgaatgagcattaggactcctttttatcaggaataaaagtaaaatttcagaaaagtaattaactgaggccacacagcaagtatatggaggagtctggcttgatagcaaagcgctttatatgaaatagatttttctttcctttcttcttcccagctgtagtcatgtcctgtgactcttcttcccattcccagccattcttcagctaaaaagaaagtaaatattttaaaatatgtatatatattttagatatatatatttatattttaagacatatagataatatataatttatgatttatatttaaatttgtataaacttatatttaaattataaatttaagatttatattattatatatatatatgtacttttcccccattttcctcctagaattgtttttttatcctttataagacttaggcaggtgcaggatatattttcatccctggactcaagtgtggtgtcaagacccttaacttgtgacatgaatagcaaggagcagattggattcccactggagtggaggcccctaatcatggcttcctgggatttgtgttatctgccttcccctgttagatgctgagaacatagaagaagaataccaggttctggttcaagctatatcattggcacagtctgtgacctagagcagatcactgctctctttctcgtgaaaatcaaatttagtttcctacaaaatttaaagttgagcagagccttggtttagtcttacagactaaaaatcttttttccttccagttcagtcacataatatttataagatggtgaagccaagtcacttgccctctctggccctgagtctcttcatctgtacaataagagcaagaactaaatgctcaccggacttcccagcagctcttggtttcaaactcaggggagctgcaggaagaagctggctctactctgccaagttctgactagtgagggtttgcaacaaaaccagccagggctagtctaggcaaaaaggagagtttattttaaagatatttgtgcagctcataaaatcaaaaaaaaaaaagttaaataatgagacacagagaagttgggaaccaggacagcctcagggatctcttcagcaggagctcatgacccttccccctggagtgctgccattaagatcactccaaaaaagcctgtttttatgtttctttcttaaaaatgacaaattccagaaggagaactgccagggggccattcagttatggagggtaggattggacaggccaaccagcaggaaagtgttgctggagcccagccttgttggaggagcaggtggttcccaggaggacctgggcagaactccccaccacacacacaggtacaccctacagaaagagcccatgtgtctgtaaatgattgggaagccaggtcgggatgttaaatgtgggtgggagacacagtgggcaggttcaatactctagaccagtagcagccatggtgatggaattcattcagcgttttcaggcagctgtgcctcatggaagagtaacagacttcaaggcaaaaggcatgatgagtggacagtccattagggattgctggtggctgtgggcacaaagaaagacaaacagtgtgatctcatggggaggctgaccaccaccatgctggattaggatcctctcttttcagccaggtcaaggacagggtactctggtcccatcttttctactttgatgacatttgggcaagtttcaacctcttgagagtttttctgtttccttatctgtgaagtggggatgagagcaatgataatcatgctactcttccaactgacaacagtacggcaggcgctaacatctgctggggccaggcacccatgctgagaacttcccatgtgggttgatcctcgcaatcctctgacacagtactgttatggtttacactttgcccaaggcttgtgggaattaagggggcagtaaagtgtagagcaaagcagtgtgcaaagagactgagaggctgggctcaggagctgatggccagttttgaattctggctctgacactcactggcctggtgttttctggcatgttgcgtgagcttcattaatttgtaaagtgggtgtgatactagtgcctgcctcatgctgtggttgtgaggagtgagtgatttcacaggcatccaggaaggtgcctggagcagagcagtgctctgtaatgtttgctgttgtttgtaataaagtgcctgccgggcagtggggatttgaacccaaagcagattgactctagaatatatatgctgtggcagttatctctggtggcagaacaagaaggctcaggagtgagctgtgtaaaagccggggtgggggtgagttagcagagggagctatggaactagggagaggaagagaatgaggagccctaggcacgtagccacttcaacactccttgtctctgtgaccttgagctggacccagaaggtcagcagcaattgctgagtccccataaccaacgggaacattcagcactgacttcacttatgcttctgacttcaggagggctttagagagggggttagttagaaaaagaaggaaagaaagagagacagagagtgactaagacagaaagagagtgatgaagtcagggggagggtggggagagaactagatataaagacatagaaacccaaggagagaaagagagtgattgacactcaagaagataaacagaagaggcacacacttaaagccacagaaatgaagtagaaagacgggaaagaagggtgaggggaaggatggggattttgcagagacagtgctgagggggctgtgactggctggcctgctctgtggttgaggagcaaacaaacctgttaagtgtgtcagtgctttatctaggaaagcacctttgccaaggcccgggcacactgaggagctttttgagcgtgtagggctgtgacaggagagactctctttatctgaattggagacaggagcactcttctgtgcatttcacactggatgccacagattaggctgcggatatttcacggttggtgataaacatttgtttggagaagccttgagcagagcaacactcctaaggctgggggaaggggttgataacaggcaggtacctggagactggttttacatgagggactggttctatgcaattttacacttgtatattattataggcattgaaagtccctagaaggatacccattaaaactttgacaatagctaacctccctggttggattaatgaggagtctcaccttctaagttatgtatttcagttaggtttacatgttttacagtgtagggattttataatcagagaaacaaaggcttaaggtaataagttaactcctgaaatgaaggaagggaaagcaatggcccctgacataaaacaggttgttggggctcatccgacaaacagacaatgggtggcggaaatggcagtgcatttgaaaatatttctccttgatatttccaagttactttgaaaatctgatgatcacaatctttcctctgattcttgcagaagggtgaaattattaatgtctcctcagctcagacaaatttccttcctttggggtttccttggggtttaaaaaaatacggcagaaggtgtatgccctgttagttggtgggtttctgttgggtatggtggatatgaggcttttcccttgagagaatgatgcacgcagcatctgcagaatcctctcctccttgaagtccccacctcccactcctttttgttttaaattttaaatgaagtttgtgcctagtacacacttttaaaagtattgtctgttagcttgagaaatgacccagatgtatcttgtttcaggctttatgaaggcaaagaacagatggagtttgaagaatccatgagacggctctttgaatccatcaacaatctgatgaaaagtcaatacaaaactaccatccttttgcaggttggtttatgctacaataaaatctatcttctccttggccatccagtaaataacagcatgctaagataatatcttcttttacttaaatatgcaaacttgtatccagtgaaggcctgggctggccactaggttaaagaccaagggctcctcaggacaagagaaaacgtatttattgtttgttacccatgaagctagcagtgccttcttttaaaatagctctgaaatttttgttacctagaaggaaattagtcaaaccggatccacttccaatggagagaacagttcatggtagcagtctcttaaactgagtttaattctcgacaacataaagtcagggacccttttgggattaaagagggctcctcaataaacaagaggtgctttggagagaatgagtcctctcatgtgtggtccacgatgctaatctgtgaagactgcaaatctttgagaaactgtgaggcctatccctgtgtttgggaaggagttgagcagctaagagtctgaatgaagaggctgtttcagggagacttcagaactttcacagaatgcacttgcaggcactgggggtgcgggtgggggaagctgggagtgcctgatgtgctgtgaataaacgaagcccaaacacatttatctaaatcaatgagttaatgcagattgctgctgctttttttttttaaatcaatattattcttttagatgctaatttaaagatccattatgcctgagatgcccaggcactggttagaattaatgacgtactagtgtttagctagaatgaaggtgaggaagcagaggtggaagtcagcctggggaatgtttgcttctcatgctatgggtccagactgtgcacgttagaattgtgtggggatctttaataaattctgatgcctggttacaaccacccgactttctaatttaattggtatggagtgtgacccaggccaggggatttaaaaaattccccaggtgattttactgtgaagcaaagtttgagaaccactctgctgatggcttcctttaatttaacaaacagtggaaacctgtgtgttggggaaggcaactatcttattcatatgtgtcttcaacactcagaataatcctgataattctaaaatttattctcctcagaatgtgtatctgtatttcttgatctaactgaataactgaaggtcctaacactatttggtcttatgtaacaaggttaggaacataaataccctcctctagaatccactagtaaaatacccaaaaagcttctgttttatgatgagatagaggaggaagaggtataaatgattaaaaatgatttaaaccaaactatgtaacaggctttatatttcatgcttcacatatattactttatttcaccctctcaaaaatcctctaaattacacattaggcctgccatgttataaaaggataaactgaggctcagaaagctgaaacgatgtgcctaaggctacatgcccacatctctctggtcaaaagccaaagctccttctcctgcagcaaatctcaaagtctatagaagagtccttgtgtgggatttgctgacatcacatgggcttcacccctctgccctcatcactaagttctcttcacatggtactgctttccatatttgaacataactttaaattcttctttgataacttttcaacagccatacacataggtggaaagcatcattggttttatgaaaatccctgaggctaaatttggcccttagagcaaattgaaaaagagatgaagcccctttctatgtctctgaggtggaaatctatgggaagaaaccagcataatctggcccaaatcacaaggaaaacaaggcatttctaacacagctacccggacaagaagaacctgggtaaaaagacttatgccaaaaccataataatcatatgagttctctaatcctaatattaggattattctgagtgttgaaaacacaatgattagtgtgtcttcaactaataatcatttattagttgatgcttaatagatatctgttgaattaattaatgtataacactagggatacgtcttaaggtttctattttattgatgagggaattgaagctcagacagttgaaacagcttcctccaggcaccattgctgagaagtgggatggctcagattcatatctgttcctgcctggctctaaagaccatactcactaccacggcattagcctgttctttatactgtttctttagtccctgctggggatggatgtcttcctatggattagttgggactgcagtcttctagtttttatttttcccttaccccctcctggttaaaaagcaaacaaacaaaaaatgtattcctcatattcctaaccccttcatcattctctgactaaggggataacaggagcaggggacagcatgaggagatgcggcaggagccccagccagccactgcatctgtatcacactggaagcaactgagcttctagtgagtagccacacagtgttgggatatctggagagagccaaggatgaccaattgccatgagagaggctatagggttgaatcaggtgtgaaatcagctccaaggaagctgaagtgtgaaagagcagaaatgatgagccaatagataaagccagtttctcatcccagaggagaaaggcgctgatgccccaaagaagttgaggtgccatggagagaagaatggaagagggaataggtaattttggagctactctttctaatttcagcacctgtttccctacgatgggctacacatatatttggggaaggaacaaagggagagagacagtaagaaggcagggaaagaaagaaggagaaaaaaaggaagcaaagaggaacaagtgagcatttgccgctctcaagacacctggtcaataggaatgcccttctttatcagctgcatgaccttacattggtcacttaacttctcaatgcctcagtttcctcatctataagatttcattgtgtgggtgaggatcaaataaacattgtctgcaaaagaacaaattataaaatgctatgcaaatgcagtgaactaatatgattattatggttttggcataagtctttttacccaggtggttcttgtctgggtagctgtgttagaaataccttgctttccttataatttgggccaggtttgttggtttgttctcatagatttccactccagagacatagaaaggggcttcatctctttttcaatttgctctaagggtcaaatttagcctcagggattttcataaaaccaatgatgctttccacctatttacatagctattgaaaagttatcgaagaagaatttaaagttacattctaatatggagagcagtaccatatgaagagaacttaatgatgagggcagaggtgtcaagcccatgtgatgtcagcaaatcccacacaaggactcttctatagactttgagatttgctgcaggagagggagctttggcttttgaccagagagatgtggacatgtagccttaggcacatcgtttcagctttctcggcctcagtttatcctctgtaacatggaaggccaaatgtgtaatttaggggattattgagggggtgaaataaagtaatatatgtgaaacctgaagtataaagcctgttacatagtttggtttaaatcattttttaatcatttatacctcttcctcctttacttcatcataaaacagaagctttttgggtattttactagtgaggattcagaaggcgggcatttgtgttcctaattttgttacacaagactaaatagtgttaggatgttcagttattcagttagatcaagaaatataaatatacattcttaagagaataaacccacaagaagtgactgtatgaaaacatgcatgggaaagtttcagctagtgaaatagtacgaggtgaccggagtcttgattctgagcctgcatggggtgtgagctattagtaacatcagccataagtgctggctgggtgcagaggatatgaatgcccgtggttgatgttcctggttcaaacttttcacatccagctgggtagcggcttatgttggaaaccctcttttgtgaccaatttaattgtgagtagagcagatctggttcaaatctcagctgtgtccactgttaactctgaaacctaagcaagttattgcccatctctaatgctcacccagcttttgtgagttgctttctgtggtttttcttattgttctgagtcggcgtggcagcagctcaccaagaccacggagaattgaaagccagtagttcagaggaaaggagcaataaaaacactttctgctgatcaggtacctaccatgttccagacatggaactgggatcttcatatacagtgttttaaatcccgccagagatcttcaaggaaccactatcctcagtgttcataggaggctcataaagttaaatagttcatcccaaattacatgtattcatagtgctggagctaggatttgaatccatccaggtcatctgcctccaaagcactattctctatgccacaggtaaggtttaggccagggattcccatgtgttttcaacaatggaccacatgctcagaagtccttgtgtgtgccagccctgtgagcgtggttgataaaactgatggcagattcagagggtcaacaccacacacatgtaaattagatagagctcaaaagttagtaaaagacatatggcgatgttgtgcaggccaatttgccccactctccttacgatccatggtatttcataatgctccaatttgatggcacaagtggaattaaatgaacagcttgtattgaatgacatgctctcttggccactgtgaatgccacttatgctaatgaagcccctggagtgtccaggagggcaggggactctgccatttatatccccaatgtctggaacaatggctgccacacagaaagtgctcaaatatctactgtctgaatgaatgaatgaatgaatatggctgggtgcaatggtgcatgcctgtaatcccagcactttaggaggctgaggtgagaggatctctcaagcctaggagttcaagaccaggctggggaacatagtgagaccctgtctcgacaaaaaattaaaaaaaaaaaaattagctaggcatgggggcctgcccatgcctagtggtgtatgcttgtggtcacagctactcaggaagctgaggcaggaagatcacttgagcctaggggatcaaggctgcagtgagctgtgataatgccactgcatttcagcttgggtgacaaagcaagaccctgtctcttaaaataaataaataaatactgccgggcgccgtgactcacgcctgtaatcccagcactttgggagaccgaggagggtggatcacaaggtctggagtttgagatcagcctggccaacatggtgaaatctcgcctctactaaaaatacaaaaattagctgggcgtggtggcgggtgcctgtaatcccaggtattcgggaggctgaggtaggagaattgcttgaacctgggaggtggaggttgcagtgagccgagattgcgccattgcactccagcctggcgacagagcaagactctatctaaaaataaaataattacttctatcattttgtttagtttgatgtttcagtgtttattaagtgtcaagtgttgagctaaaagctttacatatattgttagctcaattgatctttgtaacaacaaccttataagacaaatagtctttttaagttccatgacatacctgcacagaatgtgcaggtttgttacatagatatacatgtgccatggtggtttgctgcacctatcaacctgtcatctaggttttaagccctgcgtgcatcagctatttgtcccgatgttctccctgccctcacccccccccaccccctgacagctcccctgtgtgttgttccccaccctgtgttcttattcttgctctcccacttatgagcgagaacatttggtataaagcggagataaagactatatgcaaagacaaatgggctttatctctgctttccaaatgaggaaaatgaggcttaaagaggttaagtaacttaccttggctgaaaattagtatatcttggatttaaattttggctgtgtaagtccagagtttgagttcttaatcaccaccaaacaatagcgcaatttcattaagactaaagtcttctggcaaaaccccaggtggataagactcaggggaccccataaagttgagttacagaaaggatggaaacacacatattctggaacctgttggttcctttcccttcactttgcctgagagattagtgatgagactgaatgtcctgagagagctgcatttattttcctcggggacaactcagcatctcaaaggaaactgccttcttatggtcatgctatggggaattcctgtgacatcgtttttccagtttctatggaccttgatcatccactgcttggctaaaataaaaggattaaaaattgaggggaatagtacttgttttgaatgcctgtggctcttgaatgaggaagctatctggtagcattcttgcataactgtgtatcatttcaagacatgttcattttggccagaagtctgagtgtactggcaccaacactggtcactctgtttgaaagagagagaaagggaggagagagagagagaaagagtgaaagagagaacaggaaagcctgaaagcactcagcagacaagtccctctgagtttggaggcatcctagtctggttttgatttttgttgttatgtttaaacacttgccgttttctaattctggtgaagtccatctagatagcaatgatctcaagtgtcctcccttgatttacctctgggacagtaaaaccactcttggttgctttgggtttgattctcttcttgagggatgtacctggcctttggcagaggggttcagagtggacccttaatctaggaaattcactcagtgccacatgatcacctaattagcgagatagcattttcctgttggccattcttgcaaccccctatagatgtggtaatgaggatccttaacttaaggaatgtcagaagaactgcactttattttcaaaaactattcttacaaagggtgggggaagctctttttccacttcctcctccaaattagccttctcgcccctgctgaatcctccccacttgccgagatagaatgcctttcctacagcatgacaggcagtagtggacgtactggataacagccagcaggacagagctgggtacacatccttgctttgcttctcattagctacatggcttctggcaagttatttaacttcttctccatgccatagttttcacattggtaaaatgggattaacattttccactcatagagtagttgaaagaattaaatgagatcatgcatgtaaagtatttggcatgtaaacagtttccaataatggttcctattttttattatttatttatttatttatttatttatttatttatttatttatttatttttgagacaatgtttctgtctgtcaccctggctggagtgcagtggcaaaagacagaacactgtagcctctagctcctgtgttgaagcaatcctcttgcctcagcctcctgagtagctgggatcacaggcctgtgccaccatgcctgggtattttttttacatatatatattttgtagagattaagtcttgccatgttgcttaggctggtcttgaaaccctgggctcaagtgatcaatcccttggcctcctgaagtgctgggattataggcatgggcaaccatgcccagccatgattcccacttaaaaaccctataattcataatcgtattatatgagtatgtgtgtatatgcatcacatgtatgtttatgtgtataggtatatatatgtatgtgtgttttaagtattatacacaatataggaatatagactatggaatgaaagtaataatgatacaatattattttatgaagaatggtagtaataatgagagtaaaaataatagaacggctgggcacggtggctccagcctgtaatcccagcactttgggaggctgaggcgggtggatcacctgaggtcaggggtttgaacccagactggccaacatagtgaaatcctgtctctactataaatataaaaaactagccgggcgtggtggcgggtgcctataatcccagctactcctgaggttgaggcaggacaattgcttgaacctgggaggtggaggttacagtgagcagagattgtgccactgcactgcatcctgggcgacagagtgagactccgtctcaaaataaataaataaattaaaaacaataataataatagaagagtgaaactcagttcccaggatagaaacatgtaacatatggagtctcccataggtcttatggttgaggtgctctgccttctgggagcgtttggtgctggcacctcctgaacttgcctgttgtcacctgccccagtgtgtcagggcaagaccatagacagaagtcctctgacaaatgctgaccgtgacaacagtcttggcaaacttcagtaggcagagatgggctgtccccattgggaaaaagaaccacaggcctgccacttctctgtgaggccgcctggactagatgcaaatttaatactcccctgtcatgttgctaaaaccctctgagactcaggtgacagctacttgcttcatttgactgtatggcctacctggagtgggaggctgggaagatgggcttcttctgagcagcccctcccgcagcctgtgcagctgcctgctaatagctaaagcatgtaagtgtgcgggctgtggagactcctgataactgcggttccatcgtgtccctccaaagtcctggaatgacatgcagctcttgaaagccagcaactcgcagcagacactgaagtcctgcctttccccacaggggtttgtttctgtgcatgtttctcactttggccttaattatgatgagtacgcgttataatctgtccaggtgtggggtatgatggccagtgcttgagtaatgagatgggaagaaactcagcacacaccatcatgaagaggctgaggctcaaggagtgaacaaatgagcctaggctcatgcggtgctgggtggagagctcagggccctgagggctgtatgttctttggcctaagagtggatgaagaaacagtttgctagaagtgcttgcaccaggccaggcatggtggctcatgcctgtgagcccagcactttgggaggtcaaggcgggtagatcacttgaggtcaggagttcaagaccagcctgaccaacgtggtgaaaccccatctcaactaaaaatacaaaattagctggacgtggtggcacacgcctgtaatcccagctactcaggaggctgaggcaggagaatcgcttgaacctgggaggtggagtttgcagtgagctgagatcaccccattgcactctagcctgggcaacaagagtgaaactctgtctcaaaaaaaaaaaaaaaatgaaatgcttggactagcctcttttcagggcacatgcctcagtatatggtatccctttagacttcagaggttgtaaattagtagcctctgggagaaatgcagcctgcatttgtgtttgatttgtctagcaaatcaaagcgttaaatcaaagtgttaaaacaattgataggaataactgagtctttagggagagaatggaatccacacacctcatcacttcccactgccctgtcctcattccatatcacttctttctgttgcttgtctagccctgcagtcatctgattttgctacatctgcttgatgtttcctgataaagatggtccttgaccaactaggttggaatgtactggatactgtgactgcctggaggaatgtcataatgcttcttagcatattaaaattatgaaaagttctatagttaaaaaaaaactcactggtttatctttgcttaagccaatgctttccaaaattctttgattgcgaacccttttcccctacagaatacctagcaccatcctatgggacaagaggctccaatagaacatagtttcagagacaatggctttggaatgttgttttatcttataatctacatttaaaagaataaagaataaatctctagatacaaaatccaataaccataaagtaaaagtctgacaaatatgacagcctgcaaattaaaatctttctatgcaatggaacaacaggataagtgggagaaaattcttgtaaaatatgttactgtaaaagggttactattaatgatgcatgaaaaattttaaaaaccaataagaaaaaaatacccaaaataagaatagaaaaaggatatgaacatgcaatttagtaaatatagatgttcaataaatatggaaaagatgctcaaccatactagccaccaaaaagttgcaaattacacatcagatcaacaaaaatctacaagattgtatgtccaatggtagcaaggttatggggaaatggtcaattaaaggaaattggttactgtatcttccaaggtaattgacaatctctcctaaaatgtatatgtctatatgttttcatgcactaattcttctttgaacaatctatcctacaaggatctttacagatatacaaacagtattttttttaccacgtatttataataaaaattgacaatagcatggagcctatgatcaggggtgggctgaagaaggtataatgtacccatttgagcagtgctgggcagtggttagaaatgaaaagaatccactctatgagaaggcaggatgccactggtgtgcagttaactacaaaaagcaagttgcagacatgtatatttacatacacacacatgcacatgtaggttcatgcatagaaagcagtctggaaggaaattcatcacaatgttaactaacagtggtcctcccctctctggggaggagagattgggacccagaggaggatgcgatataggactttggaaacaattttcaccctcatgccttatctggtatgaatgtttttacatcaaacatagagtattgactttttaaaatttaaaaattataaacaagattaaaaaagggatgaaggcatagagagagagagggttgctatttgagtaaggtgaccatgtagcttaagggttacgagaaatggctctaagtgcagcctgcctgaatttgaatcctggctctccacttgctaacttttcaaccccaggctagttatttaattgtgatgcaccagagattccttatttatgcaaataatgtttcccttgcagggttgtaactaataagctaatctattagcagtctttggtacagcttctgccctgttgtaaattcttagagaataatcataatcattatttatgttaagaatctcagttgtatatggctaggaggaagattttctttaggaaagtaattttcacgattttttacttgagtctgattgttaaagggtgatacatgttagtaacagaacacctaaaatatacagaaaaataaataaaaaatgcatacttccattagacccttacacattattttccattcatgtgacttacagttctttctactgaaactgtagtctgccctgctgcttagcaagtggtgttgctatgcagggggtgagtgtggctcctatctctggatgcatcagttactttaagagaggaagcaatccactacaatgctcagctttcccaacccagctagtggaccaaaacatacccactattattcacaaagtggccagggagaggaaatatgaataacttgtcaccagcaaagcaattcaagtacaccatcttccattaataatatgtcaccatttattgagcactaaaataggcctggtgctctgttggatgcctcacatatattatttttaatcttcgcaatccttcagaatacatataactttgtctatttcacagataagtaaatgtctgagaggttaagtgttttgtccaaagcctcatggctaataaggtgtggaaacagaatttgcagatctatagaactacaaggtctgtggtcattctagtctatgttattgcctccttgaagacaggagttgtgacttcacttttgtatacaaagaagtccgtgcttatgttttgatgtccatacagaggcttccatcaatattgtaatgtccaggatgcagaatcattctcctctgatctgtgtcatgctgcaaagtaccctctttgccagcacagacttgttgatgtgaggatcacttatatgtattttacattccacctaggtggcggctttgaaatacatcccatctgtcctgcatgatgtagaaatggtctttgatgcgaagttactcaggtgagagctcatgttgtactttcttgggctctgctggcaagctagggattcagagtgggaggagggctcttatggggagctccagatgggcactcagcttggggatggggaagacctgtggcaggggatgttttcagggtttccggtgtggtatttttaccttttggttttcttgtgccagactttggtgaaaaccaactgtataataagcatccctctttgatgatatgaaaattaatcatataggttaaaaaaaattgatgtttgagatgaatgtttccatttcacctgggcctgaaggttattttgggttccactctttgccttgtagaccccacagttgcaaatggagaacagcctaagcatacctaaagagataatggagacagctcccttttgccttctacttcttaactacgttcagctcatagatgaacacgttattttaatgtgattatgctgttggaataggggcatttcaatcagatataccttcttctttttaaaaaatgtattgtagtttacagataacagacttaaaagactttttatatttaaatacttatagatttagaagagagttgcaaagattacatacagagagttatcatatgcccttcacccagcttcccctaatgttaacatttaaataactatggcacatttataaaaactgagaaattaacatggatacagttattttaactgcactctggactttattcagatgttaccagttttttcatggatgtcctttttctgttcatatggaagatttttgctagctccttctcatccttcagaccctcaggctaaatgttatcttggaaaagctactgctggatattgtaaataaattaaatttctcccccagcccctgtgccattattctctgacacagctccctatttatttcctccactgcatacatcgctgtgtattgatttgtttgcttctgtgtcatttgatgacctctattagaatgtaagttccatgccaaatgggacccagtctgttcccattatatccccatttctctgcgctttgcctgtctcatattaagtagatgtttaataagtccttgaaagaataaatgaatacaataagtttattttggaaagccgacaaggactataattttgtttcagggtattttgattctcaccctatttgggaagagctatctcccttttgatgtcccaaactggttctaatccacaatttttcatagttttaaaaaaaattagagattttgattttaagacttatcataaagcattaccaagcataaaacatttgtaagtaaaatggtatggtaatgaagtcagaaccttgttttgaactcttgtttctttaacttcctagctgcataaccttagaaaagttagcctttctaaacctgagctttctaacttataaaattgggataagtattgtatatagcttgtagagttatgaagtctacatggcataatgaatgcaaaatgcaaagtgtgtgcttggtacacggtaactgctcagggctatgggtattttcagatttttacgtctcttttaatgctactaatattctataccaagaacaacttgtacatttttactgaaggcttaccttgcacctcatgctctgccaggacttgggggtttcccagagctagaggtccagggatggactgtaagtgctatgagctgggagacatgggtctgccttgctctaccagctcctatttttcctgccctcagccaactcctgtatgagttctacacctgcatccctcctgtgaaactccagaagcagaaagtacagtctatgaatgagatagtccagagcaacctctttaaaaagcaaggtgagtacacagcacccttgctggggtggggtaaggggccaataaaccccacatcattttggggaagcttggcaggagagggcaacctgtccagtgactataacatctcttttctcacaactcccttggtctgcataaatgcaaaaagtagaaagtagctgacaacttagatatcagaatctaaattgattttaggaaagctgaggttgcattgtttatttctcttgagaaagtttaatgaggtttttttttccccctgtatggtttattattgctgtctttaactcaaagggaaatggataaagttccttttagtagaaagagcctttcacggggaagttctcaaaattttgagtgtgtaagaataaactggagagcttattaaaatgctaattcctgagacctagctcgaagagtctaattgagtaggaattaacattttttaaagtttttagaaaaatgtaaattattttggaaaaggtaacgcatttacatggatgaaaatgaaaaggtatgaaagggtaccatgtggaaatggtccctccagaccctgtgcatggctaatcccagtcccttctctgtggcaaaaggcatatccagtttcttgtgtttgcttctaggcacactctgtggatgtggaatcaattacgtatatgctatatactctttattattatcatgcaaatggtagcatgctatgtaactgttctgcactttgcctttcttcacttaatggtatatatttttgggagatcatggaatgacagtggatttgcacagaagttatgttcagagcttctgcttaccctaaactggtcaccactgggccccactggcagaagacttagagttccctattttcaaggtcagtcaactggatgtcgatagctccatcagatttgatcaggcaggattcagaagctcatattcatcctctacctcatctctaggaatgctctgcatgcctagattttcaaaatggatcatgccttttgctccatgtaaaagaatgacctgttcagaaactgcattccttcactcctttctgtaagggtgaagaaatgacttttcagggtcagtacttttttctgtatcctaagacccagcctctccaattttcaatttctctatccacactggtgtcaataataaaatgcgaagcaaactgtgcaagaaacaaagggtcttagaattcagaggatcagccatcacccaactggaatttattcagggagtgaagcctgaatatttatgcaaattgcctggtaatcacagaaatattcaggaaccacttcactgtaaagatgtttttttccaatgcctggttaacatggtgcatccaaaattgctgtctgtatcctctccccagagttaagggtaggaggaggatgtggggatgaaaatgttcttgtgattttaatatttatgtgtgtggtttcctgaccctttagacagatatgtgacaacagattaatccaataaatatgtagtttgtttgagccaggtggtttttgtgaggttatggagactaattctggtaagtcttgttgcacttcttgtgtcactgtgcctttttaaagtgagacttccatggttttaaagttctgatttccacctccaaataaatttccctcaccccaaaagcattgaaatatgtctgccccttcctgccctggaagcccctctcaggatttcaggtggtgccactgcagaggcaaattgagtcccatcctagagacatgacaaggacgactctagctacgcatatggtgtggcacaggcagcagggagtgggctgcttggctcttcttcattgttcagagctgctgtcattgtcaggggcccggcttggcatcaaggccagatggagtgctagcacgggcctgggctgggcatgtggtgtcaattccagcctcttggaagtcggagtaattccttgactgcagccacatctccagggctgggaggaggcctctgagggttagcatcatggcagggcaggctggacagctgctgcttctcagtcctgctgtgtgtctgggtttcagattcagtagaaaccctctgattaatattaactgacagaaggccagccctggcgttgtacacagttaaaaaagaaagcaaaattcttacctttaaatacatacagagactagaggtagacaaagtatcctttggggacccctttcaaagaggaggcaaagtgtaattagtgtagccacgctcggctcacatgtgaaagtcgtatgaccttattcacagctgaaaggtaactcctctcccaccatctatttgctaagtgagccctgttaccaaaatagtcccaaagggaaacttcagctcatcccctttcttaaatcctcaagttcccaatgaataaaacctgaattcattatgcttactaggtgtccatcgacctcgggtgagcatctctctttatacccttaaataaggtgagtgtgattcctctggccaagtttgagcagtaatgaaattcctcctgttattctccctgtgaagtgtcctgtgcctcggggacgtgatttgctttgagcctgcactcatttaactgccagatgtgcaaattgcctggagtattttcagtgacagttgcttgtactcacagccttgaacatttgtattgacattaagcggagggaccagaaggcttttaagcactttctgggattttggcagactaccctattggcctgtcatcagaaggatcctatggagaaggtggagaagggtttactggttaaggacggtggttcttgggtcacactagacccgagtttacttcctggttcagctttttacatgactgtgtgactatgggtaattttctaaacctctctgattctcagtaagctcatctggaaagtgggaataagaacaataacgtctgtcttagagggtgatagtgtgggctaatgagatggatgatgcatttaaagtacttgacacagcactgggctcagcataatgtttcatactaaacagcaattgttattattggtgttgtggttgtttttcctgctgatcccaatttccgtgctgacctttaaattccttgcaataagggcatcccttaacgtttgatagttgcacacaaccctcaactacatggttttcctcagggtccgagagacacaggacctaatgaataaaagggccttggttggtacatgctctccattctgactttgaacgtgtttgttgttgttgttgttgttgttgttgttttcaatttttattgccctagaatgtttttgtaaaggggccatgttacatatgcctggaagaagtagaggtcaaggtgaaatatttgtgatttctcacttcattgtttgtgttactacaggctccaacatagttacatagttttggacacttgacagctatcctctctgatgatttacccctcagggctcttttagcgcacacacacacacacacacacacacacacacacacaccccacacacagttttttccttgttttctttatggaggcaattagcctcaactttgatttgacctgtgatattgagtaaattacttaatccttgtaagtcttaatttctgcatctgtaaaatgggaatagtcacagaatgggtccccttgggttgcttgttcatcagtggcacatgtggctagttagcctaggaattgcaggagtaaggagtcatcaccagccaggttcccacatggaatgtcttgctccctgtggatgacttcaggcttcagtgagaggagaactgagaaacttacaaacactaatttgctgtcttctccaacacaagctcagacctgcctggtggtgatgacaggagaaaggacgcacagatatgcccggagaaagctccaagaggagtctagaagaaaagcaaaccctctgtgcctttgaaacagatttgtccctacaagaacctcatctccaagaaatgtgtctttttagtctgatgctaatcagaggcaccatctggttcagtgtaaactgctttaggatccacattgctagagatttctcttcaaatttccaaaacaaacacagagagagattgacagaaagagagagggaagaaggggggagagagggagagagagagacagacacctgacagagatttggaagctctttcaatgtttattttcagctggtgggtttttttcactgggaactttattgagaagctgttttttgagcaaagcatccagtttcccttttattaaagcttagcttccttcttccctctcatctgttgcccacagtatctggagatgctgggtcccccattcacagtgtacaaggggctggacaacggttggggaaaagagggatggaaataattgtgcctatatcttttctaatcaacatatcattgcagcattgggctaggaataaacaaccctctgactctagcagttactaccttttttttcttttcaacttttatttcaggttcatgaggaacatgtgcaggtttgttacatgaattgatttcatgtcaggggtttcatgtgcagataattttgtcacccaggtaatacgcatagacctgataggcagttttttgatccttaccctcctcccaccctctaccctcaagcaggccccagtgtctattgttccgctctttgcatccatgtgaactcaatgtttagctctcacttataagtgagaacatgcggcatttggttttctgctcctgtgttaatttgcttagaataatggcctctggcttcatcagtgctctgcaaaagtatgtgattttaatcttttttatggctgcgtagtatttcatcatgtatatgtaccacattttctttatccagtccaccatcagcgcgtgtttaggttgattccacgtctttgctattgtgaataaagctgtgatgaacatacacaggcatatgtttatgaatgttaatgtctttgtggtagaacgatttatcctcctttgcatacatacccagtaatgggattcctgggtcgaggggtagttctgttttaagtactttgagaaatctccaaactgctttccatgatggctgaactaatttacattccctccagcagtgtatatgcatccccttttcaccaaaacctcaccagaatctgttaatttttgactttttatttatttattttttttgagactgagttttgctcttgtcacccaggctggagtgcaatggtgcggtctcagctcactgaaacccccacctcctgggttcaagagattctcctgcctcagcctcccaagtagctgggaggtgcaccactgtgcctggcttttgtattttagtagagacggggtttcaccatgctggccaggctggtctcaaactcctgtcctctggcgatctgcctgcctcagcctcccaaagtgctgggattatgggcatgggccactgcgcttggccaatttttgactttttcataatagccattttgagtggcgagagatggtatctcactgtggttttgatttgcatatctctaatgactagtgatgctgagcattttttcatatgcttgttggctgcatgtatgtcttcttttaagaagtgtctgttcatgtcctttgtccgctttttaatggggttgttgtttttgcttgttaatttgtttaagttcattagattctggatattagacctttgtgagatgcatcatttgcaaatactttcccctattctgtaggtcgtccatttactctgttgatagttgcttttgctgtttagtttaattaggtcccacttgtcaatttttgattttattctagtggttattactttggtgatcttctttaacatctctgagcctcgggttccatgtcagaaaaatttgaaaaatgtgaataggagtgtcatagaataagagacctttgagtcaggatatccttattttggatcctggcttgattgcatgctagctgtgttcctttgaacaagtaacctctctgagctgtagcttctttagctacagaaatgtgataacttatgaaaagcaactagcagagtgccagagacccagctgctgcttattaaaatgcatctattttgtctgttgtataacagtactaaccataacaatagtaacgacatcaacagcaacttaaagggagagacttaatatttatcaaatgccagctctgtatcaggtattacatacagcataaatatatattaagtttttacaaaaacctaatggcctagaaagttaagtaattttcattccagtgagatcaaatattacacaacgtattagggtattaatattttggactatgtgatgctagggttacaaattaatctccaaatctcagtggtttgataatggaaaggtttatttctctcctgtgcaaagtctgatgaaggtcatatgccttttgtccctcctgaagttgtgccagctggtgcatgtggcctccctgtagcaggaaagataagaagggagggaaggagcacagtggctcttaatgaccttggcctggaagtgacacctgccagttccacccacggtccgttggccagaacacatcacatgtgctctgccagttccacccacagtccattggccagaacacatcacatgtgctaacaccagagaatctgggatgtaaacgaagcacacgcacatgcaatatttgatgagcgctgtctctacggctcacaggtagtaagtgctggagctgattctgagtgcaagtcatttgaataacagaacccacctttttctcactatgctttattcttatgaggactaaaaaggagaaaatagtggtgtattgacttggtaattcttccttctccatgtgagaacaagtgcctcaccattcctcctgaaggatttgtttatttccattccctgctcccaactcctgttccaaatgccaggctatacatgaactctgacaggtgtgcacagggacccttgcctgggagggggatgaggctcttgctgccagcagttgctgtgtcacctgtggcttctcagggcacagcttccctgcagcaagccggggtgttagcaggctgcccaagacttggaatgttgacatgaggctctgcttctgagactgttcagaaggaaaaggcagttaggagaacaaagcctctccctctcaggatgtgctctagcctcatagtggggctgtcatctctctttgtaccttacatgcccttgcaaaattcagttcattgcatatagtgcctggaataccttctactgcctcccattccctacctcaacccctagccatgctcaacaggcaactcctactcatccctttaagaaccaaagtagacctcaagcctgcagtaagtcctccctgatgtctcaggcatttcagctcaattccattcaacatttagtccctggggaagcaatgtggatacaattgtgacgagtttgcaaacttctgcaccgtgatctctgtgcaaagaaaatgaagctgcttctttttgtttttaatctaatttaatcttctttttgagtctctactttgtgctgtggcaacttaaaaatttcaatacatggtatcttatggctctagatttaaccagtttttctgactcaaaacagtccccaccctcctaggaactcaaataggaaggggaagaaaggcacaggttttgacgtttccctcagtttatctaaaatgactccctttgggactttagccccagaggggatgttggtacacacaaattttgtggctttgggtctcaatgccaggtgaaggagcagctgacccttcctctccatcttatcgccttcctttctgaggagtctgtcctcatctctgtccctgggatggtagaaagagaatggctgccagggtacctgatgaatggggaaagatgtgaaagtagagggttgaatacattgcagatattaccctgattcccaaagggggcaaaacaacgcatctaacctcaaagcttagatgtccctgaggagtttgctaaaattgcagaatcctggaccctactccaaagattctgactctgaatatctggggaggaggccagggatgtgcatggtatcagcccgccaaggggctttggatgcaggtggcccttgacctctctcaaatgggagacacagctccaggagcctgaggagggaaaggaaagcagtgtgggcaaggacatggctcccccattgcagagtacaaatttccatcatgacacttgacatatcattctagcattctctgtttatgggactgtctatactgatggaatgaactccttaaggataagggaagttgtaagttttgttttatttacgttcctggtctatacacacgtttatgtgcctggtcttactgataccagctctcagaggctggtctgtggacctcggtagtaaaagcattattcaatggccagtgtccctttaagaaaaggaaaagaacagacctcaattgtacagagctggagcagtcctggccattaattcaaaatacatcttattattgatccacacaagacatgcttttatttatttaaatgttctattcattatttttaataacaaatgaagcatccatgcattcaccacacaaaacagaagctaggaagttaacaatcacttacgtgtaaccacatgactgcctttccccacctaaggtaaccacattcttgagtctttttttttttttttttttttttgagacagggtcttgctttgtcacctaggctgaagcacagtggcacagtcatagcttattgtaaccctgagctcctggactcaagcaatcctcctgcttcagcttctgagtagttaggactacagggacataccaccatgtctggtgaagttttttaaaaaaaactttgtagagatagggtctccctatattccccaggctggtctcagacccctgggcttaagtgatccttctgccttggcctctcaaagcactgagattacaagcatgagccattgcacccagcctcttgaatcttttgttaatcattccactgctttccttttcatgcagttgtattgcatttatatatattcccagtattttagttatttgaactttacgaaaagtgtattgaactgttgataatttgaaggaatttattttttttacttaatattaaactaggaatcatccatattactgattgctggagttcattgttttgatgacggtaggaaattccattgtgtgaataagccataatttgttcattcatgctttcaatttcaggcattgggttgtgtcagtgtttcttctattgaaagcactgctgctaagaacattcttgtacatgtctcttgttgtaaatgttcaagagtctcctttggggatagaactactagtagatttgcttggccataagggatcagaatctttaggagatagtgaacactcttttccaaaggtggttgtaccaatttacactcccaccagcaatgccgaagtggacctgtgtagccacagtctctttaatgctggatattgccctacttcttaacctttgccactaaaatgggcttagactacatcatcactgtcttcagttgcatttccttgatcaccagtaatgctgaaaatcctttgttctgttttctttgccactcgtgttttgtttctttgctatgtcttttcatgtcttttgactgtttttcttttttctttttgagacggagtctcgctctgtcgcccaggctggtggagtgcagtggcgtgatctcggctcactgcaacctctgcctcccaggttcaagcgattctcctgcctcagtttcctgagtagctgggattacaggtgtgtgccaccacgcctggctaatttttgtatttttagtagagacaggtttcaccgtgttggtcaggctggtcttgaactcctgaccttgtgatccctctgcctcggcctcccaaagtgctgagattacaggtgtgagccaccgcacccggccttttgtctttctgtcagattggttgtatttttcttattgatctataggatatttaatatattctttctacttatcttttgctgattttatgtattgtgaatatcttctcccagtttataccttgtctttttatttaagatgcattttcatgagcaaaagttcttaattttaacacaatcaaatcaatgtttttttagtcaaatttttgtgtgtgccttaagaaatctttctcagtcctgaagtctaaaagatgttcattatttttactaagaattctataattttagttttgatacataaatcctttatctacagagtttatgttttatatatagtgtgagtaggaatctgatttttgtctttcatttttgtttttttcccatttgaccacacctctttcccagcttcatctgctggacagtttctcctttctccatgccagtgtcattttgcattttcaggacattgctctttcctacaggctgtgggctgagttgctatagcctagattcaatctccggtgctgaggacagggttgctgtagactggattcagtctctggtccacaacatgcaggttctctgtgctatcgctcactgagagctgaaggattaggaaaaaggagtagcctctcctcctccagtcaagcccctgaattagtcttcagtgtgatgttagcatcctgggaattatgtgccaaggcatagcacttaccttctctcggcttgcactttctcaattatgaaagaaataattttccttatggtaagaaattgcttgggctcataaagctaccttcctgtagtttctttttgtatttgataataacagcactgaactgggagtgaggagacctgaatcatagtaaaaacaacatcagcagttgcaacagcaactgacgtttattgactgcttattatgcactggcactgtgctaaacagttaggtatattatctcatttagtgcacagttgtgagatcttgggcatgtcccttaacctctgtagaacaactgtaaatgatgacactgaacaagattttgtagtgttccaccaacaatgaaaatctatgttttaaaaaagtcatcctctgcttcacagtgataataattctgaatctttttcacataataccatttagtgccttaaaaaccctcctcttcccattgaaaaatattctcccaatactgtgttgagaagtattgagaagcattcccccagtacgtctcagcatcctgcctcagctgggggcaagggatgaggccattttatagaaccttaagtgaatggagggcaattacatgatgcattcgaggttacacagctggtcatttaacagtgcctcatgtgctggagcgtttcatttcttcaagaaagtaccatcgattttgaggacaagttttttctcatcagagcatttagaggcatcaaagttcttcaagtgaggagcccactttgcccgtttcaactgcagtgtcacaaagccatagccagcaccaaaacgtcccttccacactctggagatctgagaaggggttctccctcaaatcctctcttcctgttctgatgtgacagattgcagacttcattctcagagagaaaccttcagatccagaatcagagaagacagtgatttaatgtgctgcagaacaagtccaagagagatttatgaaagtgtctgttgggggtgagggtgcactgaagttaaaaaaaattggcatacaatcaaggaaaaaaatctgtcttaaacttccaaaaatacttagaatagcagctttcaatggccttatgaactacaatttaattaggggagaaaaaaattcccgatcacttctttaatagcaatgtaaataaactcaataaactcttcgtgtgtgtgtgtgtgtgtgtaatttacctcattaaaaatagagaacaacaaaatcactctgttctcatatctttcaaactatattccatgggattcttatctagttttggaatgattctttgcattaatggaagcatacataatgagggcatttatataaatctttataaggttatgcatttactccaaaattttgttttcactgtgaaattgcaatcatgaatgattcccattatgctgaggtggggttttagaatgtttgtatggtttggctgtgtccccacccaaatctcatcttgaattggagctcccataattcccacgtgttgtgggtgtgacctggtgggagataattgaatcatgggggcagtttcccttatactgttctcatggtagtgaataagtctcacgagatctgatggttttataaggggaaaccccgttcgcttgcttctcattccctcttgcctgctgccatgtaagacgtgccttttgccccctgccattattgtgagacctccctagccacatagaactgagtccattaaacctctttttctttataaattacccagtcttgggtatgtctttatcagcagcgtgaaaatgggctaatacaagcatcctgagacttttatgttgatctgttgaaatttgattttgctaggttatttttccccaacatcttagaatagaaggaaatttcctgaagacgacaatacagttgaattgaaaatttgctgcagattcatttcagttcaagtaatatttattaaaaatctaaaactgtggcagcactgtactgtggggactattaacaaaatacagtaataagtaatgtatggccaccacttatttaaccatgattttgtgccaggccccaaataattaactagtttaattatcatgacatccatgtaaagtgtaggtatcactattcctatttaacaggtgaggaaactgataaggaggtttaaaaacttgccagttaaggaggttttaaaacttgccaatagttacacaccaagtaacagcagagacaccattccaactggggtctgtctgattccccagcacacactgaactgccatgctggatgacttctggaacagaagagtttctgtccccaggagcttacgattggagaagaaaagatttacccaaagatctctttaaatttgagctcacacatgctgggcaggtaatacaaatgagtgaaggggcagggtcatagttattatgagatttgctaagataatcattcctttccgagtagatagtcctaatgtcaccttcacttgtatttttacaactcagattttctacttgcctattaaacatgtgggaaccttctttacttcacagagaaatctgatttctttaattttcctccctaaaacacagtgccatctggttagtcatccatatccccatgactgttttttgttgttgttgttgttgttgttgttttcttttgagacagagtctcattctgtcacccaggctggagtgtggtggcacaatcttggctcaccgcagcctccacttcccaggttcaagcgattctcttgcctcagcccccggagtagctgggataacaggcatgagccaccatgcctggctaattttttgtatttctagtggagacagtgtttcaccctgttgaccaagctggtctcgaacttctgacctcaggtgatctgcccacctcggcctcccaaagtgttgggattacaggcatgagccaccacacccagccatatgcctatgtgtgacagagacaagtgtatggtgaaatgtttctttgctactaaggaagcaagagtgacagaaatcaatggccagtcagctctgggaggagagactatagggattggtgaggactggggcagagtctgtgccatgggtaaacaggacagcagtgaggcagggccatgtcaatatgcagacacagtgctgcttgatagtctgtctctctttcttttttcttttttttgagataagtctcccaagtggagacctgctgatttattttcaaatgatatagaaaacagacaaaacctacagatggacccagaatagcagtctctggtgcaaatataatgtttatagagttttaataaatttataaggttttcattaatttattataaataaattttataataaagttttatacaattataaatatgataacttataagttattatgtttataaataaccctataagaatgactattgccagaattcagtggaaacagggctgttggaacattggggacagttttatggagaaggcaggatgtcagccgaacatgaaaggccagtgtatgtgacacaggccctctctggatgacagcctgtgggagatcttggagtgtctgagctgagagatgcctgcttctcaacctcagcagcccttgggattcctccttgcctgatatgcttccttgctaaggggggccttggaccacaccgagacctctgctaggcatgcttctgaagatgttggcccagagatgggaaaaatggcatttattctttatgtaagttaggattatcaaaatattgtgagttgattgtaagacatttggaaatgtataaaatgtccatgatctcacgatttagaggaaaccattgtttattcttcctctcttttgtatcatatatatgatatgatatgaatcatattatatttatataaatatatatatttatataaatatatatatataggtctcactctgttgcccagtctagagtgcagtggcatgatcatagctcactgcaaccttgacctcctgggctcaagcaatcttcccacctcagcctcctaagtagctaggaatgcaggcacacatcaccatggctagctaatttcaaaatattttttgtagggacagggtctcactacattgcccaggctggtcttgaattcctagcctcaagtgattcttccacttcagcctcccaaagtgctgggataacaagtgtgagccaccacacttggcctgtatcatatattttatataattgggatcttgttttgcatgctgtgtaatctgatttctgaaaattattaggaacattttcccattctatttttaagggcttcacaggactctttgaaggacactggctatagtcaattttatggcttggctctgcgcccctgaccaaatctgaccttgaattataataacccccacgtgtcaagggtggaaccaggtgaagataactgaatcatggcagcagttttccccatgctgttctcatgagatctgatagttttataagaggcttccccctttgctcgccacgcattctcacttcgtcctgctgccctgtgaaaaaggtgcttgcttctcctttgccttccgccatgattgtaagttttctgaggcctccctagcaatgcggaactgtgagtcagttaaatctctttcctttataaattacccagtctcaggtatttctttatagcagcataagaatggactaatacaaccaattgtaatattttcttctttaaggacatttaggttcatttcattgtatgctagaaaaacttcctggaattcatacccttaatagacaaatcattgtcctctttgcttattatttgtttaccattggatgtgagtctcacccaaacttaccagtgtttgtccaggttttgactctcccttttccctacttttcaaacacaaaggtgcatgcacacacacacagaggattttgcttcctccctgtgtgatagactcagcatggagcagactgtgttgtccttgagttaaggagttggagtaacatgatccaattcgggagggacatgttttcacaactccgccgttatccttgatggcagggggtgtgtctgtgtgtggacgttccctgcaataccaagcacttaaatgcgaccacactgagagccctcattagtcctaggcagccaaagtagatttgctgagcatgccaccatccaggctggagagactgcccacatggaaccagacgccacagtggagaggggagccaattatccaaaggcaaatgagactctaattacagctttagctaaagagtgggaaattatttgaggagagacttcccatttctggtgtaggcacaacacaggacagttgttcagaataaggggctggatcaattcctgattttgctaccttacccgggatacttcacctctgtaagcatctgattcttcacctgtgaaaggaaaacaatatagacggttgacctcactggtttcccgtgagcattgaatgtgatgttgccggtgagaggcatagagaggcctggtccttagtaaggactcataagccaagtttcatcattaataactattactagtgctactattatttgcagtcatctggtagcatcatagaaggtacaactggaagtcaggagagctggagtctcagctctgcagtttcctgtgcattccaacttagagaatgaattcatccctccgtcttcattttcctcatttctcaaatgagaagcttgaatgaggggatacgtgagcacacattccctcctgaggtttgtggtcctaagctaactgtaacctagggttcagggtttgagttactctgtgcagcagcactcagcaccttccactgccacaagtgctcctggatggtgggaacctggctcctcagttactatttctggagttcttactaacacacagaggtgcattgtgctgagaaccatatatcattaccttcatgaatcctcccatcaacactgtcttacaagggctgttatgatcacctctttgcaggtgctaaagctgagatttatataggaagctgggatttaaacataggctcctaacacccatactaaatggtctctgtgtccacagtgttcagtagtgagtagtaatatttttgttcttataaatattggttgggctgcactcgaggatttggaagaactgggatggagaggacactcagcagtgtgctcttattgcactcttctctcttttactcagtcctttcaaaattgtaggcacaaaagtcaggaaggcaacacctgtaagactttgggggcagctcctgctaccttagccctgtctaactttctctctctgtaaaatgagactgataaacagttgctctgccctacttgcctggtagagtcattttgagctacacgaaggattgtatatgcgtgtgtgcattaaagaatttgcacattgggcatatcgagtgtttgagctgaaaggaatgttagcaaccagctgcccagagatagtcaaattcagcaattgagagaaaccctgaaggggcttcaccttgggtgtataacaagcaggcccacttctccctgcttcttagaatagctcactgtatctatgtctctgtcagtctactgatctaccaatctatctatctatatatccaagaaaattttcagcaaaaaaattctaagtctaaagaagtatgtggtattcgtttttctgtgcctggcttatttcagttagcatcacgtgaaaaattgatctggctctgatgagggatgttgatagtggggaaggccacgtgtgggtggggacaggggatatatgggaactgtgtacttttgactcaattttgctgtgaacctaaagctgctctttaaacaaaactactccaaaaataaaaaacaaatacagtacaaacattgacctgaattaccaccacccctgatccattttacagaggaggaaaaaaggccctgaaagaggaagtggctcttctaaggctactgagtagaagagttaagatagaacccctggttcagctttttctgcccacataccaatttacttaccaattgttagcactgaaagtgtggccctgtccctccctggcttaaagggtacacttcagtgacttagggagggggtggtggggcttcagtttcactgcctgtgctcatggtggtgcctgtggttggggggaggggacatctctgccattgctggctccctggcatcactgtgcctgcgattgtgagctgttggtggtggtgtccaatggctcacactggctcattgctgggacagtgggataatttcctagggccagctctagaggaactcacaagatgattaggtggtggctgaggttcagatgggttcaggctttctgccccaccagcttctagctatgcaggtccagccatctccctgtccgtctctgtctgtctctcatttgttctgtccccaccccacccccgcatcatcccatgcagccccttttctaaaatcttctgcttcaccccatccctagaggaactccccctttccccttgctctcttcttaagcctgaacaactcgcatcagcttagacaccagccagttcctagggaggcagttctccactcagtcccctcaggttccaggtgtggaggaggtgtggtgactgactgtggccccgtagagagtgtaggctgcaggaattcatcccgttgcatttgccctcccagagagagctctaaccagttttctttctgggtcaccgaagcagtaaggcacaccttgccaaggtgagcattatttttttctcagacccagcgtcttctaatctactttgggggtcatgtatttccccttccaccatggctttggccttgatccttttggatctagcaaccctggcattgctgtgctaagaagcatgtggctcttgcccatccagcgtgagcccagtttgccctggtgattgccaccttcccctagctgtaaactctgctctatgactgaggagggacggagtcagctctggttagatttgtaagttttaaggctcccccaacccaataaatgtgtgtgtgtgtgtgtgtgtgtgtgtgtgtgtgtgtgtgtgtgttgaatcgttctaacacaccttccaaaatgcatgggaaagttgtcaacttcttttctcatggtgtgttaaaagaatttggcatccaataaagtacctctgggccttgtgtgctggcagcttctgggcaggttgacggtttcctccctgttcgtatttgtttcatcataagccaaacaaaagcactgagaatccatgtattcgggatctcaggggcctctcctccttctcgtgcttctctaagattttccttgtgcttacgtaacaccagcttcctgacttcaggtaaagagtgtgtgttttctctctgtattcccagtaactggcactgggataggtgtttgaaggtgaaaggaccagttgccttcattgaaagatggtaatatcgtctattgaagaaaacactacacagtacgtcttcacttattgtcatccataggttcttgggaaccgtaactttaagtgaaatgatgtataacaaaaccaattttgccataggctaattgatataaacaagagttaagttcctaacttaaaatatcaccataaaatatcgccatacttctaaataaagaccaaaacacttctaatattatacattaaaataaatgtgagctatacatacatttaagaataataaaaacaagtaagatcatgacttacccacttattccagttcagggtcctggtggctagagcccatgctggcatctcagggtgccgggcggaaaccagccttggacaggatgccattccgtcacgaggtgcactcacacacctatgctcactcacacagtggccatgtggacatgctaaatgaacctgatgcacatgtctttggaatgtgggaggaaattggagtacctggagaaaatccacatagaaatggggagaacgtgcaaactccacagacagtggccccagctgggaattgattttttttctcatcaaggttataacaaaacaacattgaatgaaacgatgttattcaagacctgctgtgctaagagctggaaaatttaaactctagtccaggaaagctactaacaagcagtgtgaccttggacaaaccacttaacctctctgggcttcatttcacattgtataatcagaatgttggatctctgagatcctgttcatctctgacagtcagccagtctctgttgccaggacagcatagaacaagagacagcagcttcaagtactatttaaactgcctgaaaggcattctgttatcctggggttttgtgggcactagtgtcagcctgacatgaaagacacagaaggactcactgtgtttggatgtacccagattagggtattgtccacacaggccgtggtgtgtgaatccagtgtgtcattgagaggcttgttagaactagttctgtgtttcttggcatgggacctggaactctaccactttctgcccttctccacgccccctctcccgcccccacagagaggggcagcagtcaggacattgcccccttttgcaggtggatgtttctctccatgcaagtgtttgtgtgggtctcaaaaatttgcttttcatcaggctcatccctgccgatgtcccagatttgccagaacccccgtctgcagcaggatgctttgttttgtttgttggtttatggggattctgggctctgtctctgggtgcagtggcaggttttaaaatcaattacaatccaggtaacaggaggttcaccacagcactctgctgtctgttcaaggcctgtgctgagaaattaagtaggtcccagttacctctcagaaaatttgtggtatttcaggggactacagcgagttgcaaatcttgataggtagtgggacctgtcagcaaacagcagactggcttatgttgtggttcagcaggaaaaggagagaataattccctgagcataagatgtgttgctccctcttctagtttatcaggagatagccacatacatcaagagacagaccctgggtttggggtacaagcaggagagctggttatttcttgctctgtttccaagaagacgggaaactgtggttgtagtctccttattcgtgatcaggttccttgcagctgtttcatctccaggcctaaagctgaccagttactcctttctctgtctcctgccaacctagggggagaacactaggcagcttcctccttagttttttttttttttttttaatttcttgattcatcctgggaaatgggtacatccacagaatgcctgctgtgtgattgcaggtctccaggtccttctttctacgccttagggtcagaaatagggggaacacagagagcaggactacctaactgttttggagaaattcaacagccatgtaggtcttcggttctcaactgcattcgaggtttgctttacccatccttgcctagaggggatttcatccactctgctggctcaatgccatcctgctgcctacagctgcaaaacttaatttttagtctacgtcttcaccttcatcccaagacctgtatcgttaactggctctctgacatatcaaattccacatgtgatagttggagccacatttttgatgaagagaggcaatgtttagaacaggttttccaattcaaaaaatgtttattgattctctggcataaacaaaacattttgtagccatttagaaaatacaaagatgatgaaaatatggtgatgtcctcaaggagcttgcctttatttgcaaaatgaggcattctttattataatgcagaatgaatattttatagtagagataataagcaaagcgccatgagacttcagaggagagagccagaggatgttaaagtcattcttgtagtttaaaacctccaaaagattatttaaaatgaacaagaaacaccaaagaacttcagaaattggaaatattcaacttttattatattagatttggtaacctctgattttttcatgatcttgactttggccccaaatgtacaaagagcgtttgttggatgatctccttaccaaagtctagagttccagagagccatttcagggttttccatttggtttcatagttgaattgtattcatcggtgactttggaaaagtcatgtcagttttttggttcttggcttcttgatctgtaaaatctggattatagtggggttaaatgtgaatatgaaataacaatgctcaacacagtccctgaatggcaataaatgctagataaatgatagtttgaaattagtatgattattatttccattttaattattcattaataattattatacccatttttattatcagtttgaagttagagacactgtagagcattaaaaataaaaagttgcttaaattgactttttagaatatcaagatagaaaaaaagctatgggagaaagggtgttcatatatactataataattatgatactagttacttttaataatttttataaaaacttacaaagtaggttgttatcactattttacagatggataaacctgcttaaatgtgccagttctttccaataagcaagcttgcagatacttaactaatttttaactattgatgtatttgttttttcccctcacaatctactgtctcctaggaaggcggagataaacctgatagtttgaaattagcaccctcttttactcaaccagcataaaggactgtttgacccaggcaagtgatgaggtgatttgtaaggccaatttaaatcagtgtcttgcccactggctttcaaagtccagggatgtgcaggtatatattttgggcagtcaggttctgttgtgcgtggattgtggtcaatttcattgatttttttttttctcaacacaacagtttcaaaatgctcttttgctccccaaatagctgatcttttcaaaccttttgctattttttcctggtaagactttcaggtaacagtgtaaatgcaatcaacaaccacacatttcagacgatgatgatgatatttttgaacatgtttaatgatttcacaaaacacagacgggaaaagttgagtggctccttggagaaactgcctaatccaacctcttcattttcagcccaggaaagtgtggttctgaggggacatgacctgcccaaggtcacaccacaagttggtggcagaattgggattaaaagttaggaatccagattttagtttctttctttcatttgcagagtaagcaaaactattttccttggcatgaaagataatttcaggtgtgtacaaatagagtactgtatccagaagggaagttcattcattcaattccttttcaatctttctgattatgtcaacgattgtgtatctttgctgttttgtttttatctttctctaataatctcctttgataacaaagatggagcagacatcaggctcaagcttctcttagtatttaatataagtgtttatttttattgtattgattgttatgatatcttccatttatggcaaaggatactggttttctggttgaggtagcaaagttttctttcaaaataaacttaagcagattcaaatgaatttactttatgaaaaatattaagtaaacaatagtgcaggtggaaattatgatgaatacatagcaggtttcccactgaaaaacataatgataaactaaagcttggaaaatacttgactggattttgccctttagaaagctctaagctctatgaagatagatatggctaaatcccagtttccttcttattcatgtcatgtcctttttatggagcagtcagaaaaacaatcattagatctaaaagaagatcataaaaactacccgtataagagatgaactcgtatgttgataacctcattatgggtagcttccctacaagccaaaaagttggatcagcagccaatctaatttcagtatggaggtagttttgtttatattttacgttataaacagtatgtgaatgcatttgaaaacagaaactagtttcatttttcaggaactgatgctgtattttaagatattttataccttattcttgcctttttatccttcctaagaagttctctactttctgatcatcttgctcttccatcagagagtgtgaatgaagaaaaagatggcaaaatgcaatttatcaaatattttcccactattaacacattttagagattagcatatatagaacaaatggaataggaatattaaagttattcattaaaatggagagtagaactctccacatatttctttcatctataatttaccaatatcaaatgaatacctggaaagaaagatgtactagattgcagtatttgagtgtttttcccattatctttaatagcaattcttccagtattgcttaatttgtttccctgctccctaaagcagaagtttcttcttagctatgatttagttatccagggatcctggagctctgaagacccattatggtttggctaagatgagcttgcctttcctaaatgccacacacaactcattcatgccccctcttcctgtgggcttcttctgctggccattagtgtttttttgtggaatgctccttcattggaaaatttattctcatttagaggaatctggtgacaaaaaaaagaaggtggagtcaacttctggtgacttatgggcagttagagtcaaacgtttgaaaaatgggcttctgaatcagcagagattttacaaagtgactggtggaactgcatacaaatgggtagagtacagagatgccaagaaataatgctacttctattaccactaataaaaagactgcatttcccagttcagggctagaaaggttaatgatgatacattcttttttagtatcaaagattaacatgataacttgcatattaaagttaattcagacctactgctaatggaaggggcatacaaaattaatttctacagcacctcataaattatgatcactcactcttctttggctggtgttctttgtcttggcaggggctgcatgtgtacttaaagtgggcacacttcagttagtaggggggcatctttggcccctgaggaatttgggaagcttggggtgtgtgccttgtagctcttaatcactgcctgtctgccggtgttttcctgctggaatgtgtgtactccattaccagccagcttgttgactggcgtggatcttggttttaatatttaatgagatgatgaaaccgggctgaaatgagaagaatgtggaaggtgggagaaagaatgggaaagataagaaaagagctgccctctcttgatggcaggagattctccaagaagagttcagcacagcatcttcaggcaactatttgctgtcctgttgagtaccaaggcccagctgacatagaaacatagccagcccaatctttaagagcaccggctctggagtccaagtacttgactacaagttccagtataatcccttgggtaatttacttgactttttcaagacttactgtctgttttaaacaggaaaaataatatggactctatgtatacatgtacacacacacgtatttatattttatataaaattaaatacaactttagtataatttacatatagaaaaatgcacacatcttaagtatatagtaaatctattagccacgacccttatcaagatacagtatattttcattacccagaaagttacatataaatattttaaaaactaaataacagtagcttatacttttataatgctttccatgggccaggtatgctgatctaagtgctttatgttatcttgtttcattctcaccaagagaggtgctgttattatttccactttacagatacagaaacaaagatacagagaggttaagtgatttctccaagatcacacagacaataaccgatattccacttccgcactctgctcaccgttgtctatatagcacttaccatgtggtctattactgactaagtacattagaggaatgagaatggagcctccttgatggccgacatttccttccattcctcttcttcatagtccagtttatcattccaccttgtcttgggctgacgggctgtgcatggtactctagcagagtctttgagggaaaagatggttccatccctaccttcaacactcagatgcatgataggtgctctagaagaagtcattgactgttactcccagaaaatcctgtcccccagctcccacccaactgtcactacttgaaattttgacaaacttacaggtgggctcactgggccccctgccagtttgggctgcttagccacctttgggctcagtcttaaccttgtccttttgatagtctaaaaatttcaagtgaaaatccctcctgtttctgggcctgttgtggctcccttgtcccagcttcccatactcatttctcctcagtcagtcctcattcttgcccagttgctatgcttttcctcctccacttttgcttttttttttttgcctcctcttctgtgtctgtcttctctttctttgcctcctctttcttctttttctccgtctttttttcctcttttacctcttcttttttctttttctcttcattcttcctctcttttttctgctccttttcattttatcatggtcttcatgagcaccaccaaataaaattaagaagccactctctgctaaatgcattgtaattgcccatgggaaattattttttttgtagggggcagccgcatccactgtatctctcatatggttaaactgatgcttacccatttgtactagattattttcagacatatttagccaatcattcctttgacatctcgttttgagtgtcttatagatactcaaactcattatttccaaaactttactcattcttttcaagaaaaccttctgctcttccatgatttttctgcctttgaacctttctcatatatgccttgaatctggtcacatctctctctttatcacttgcatgctggtcctgtacacccgtgtgtcatatggaatgcttggcatttggcagacgcttgacacatactttttcacatgaatagagaaacggaagtgccatggagggacaagcacacgctcatgaaacctcctccctttattttttttatgtttcacaagagcactaaacacagtcaagtgacttgaaaccattagcttctctccagttcttttcagagctaagatttcacaatttgagtcaaaagcagcaaatgactactaaactcagtgtagaacattaacattaaaacacaatatgaaaaatttctttaagaatttcgtgccagaaaaagctatggttcctgcaaggaatttgtcctcttctatcctaatgatcaacaaactctagaacttggagggctgcccttatggccccagtaagggcagttggagctcatgttgtcttttccattgggatgtcatctttcttctttcattctttttggactaaggtaatgtataaagaaatacttataactaataataaacacatgaacaaataatgtgcaaaattacttgcaatttcataggagtacaattgtagattcatgttgggggcactgagcataatttgaaatatggtatgtttctttttttaacttttatttgaagttcaggggtccatgtgcgggtttgttatatgggtaaacttgtgtcatggggatttgttatgcagattattttgtcacccaggtattaagcctaatacccattagctatttttcctgatcctctccctccttctactctccaccctccgatagaccccagtgagggttgttcccctctgagtgtccatgtgttctcatcatttagctcccacttataagtgagaacatgtagtatctggttttctgttcctgcattagtttgctaaggataatggcctccagctccatccatgtccctgtctccactcatacctttggacatgatcttgttcttttttatggccacatagtattccatggtgtatatgtaccacattttgtttatccagtcttttattaataggcatttaggttaattccatgtctttgcaattgtgaatagtgctgcaatgaatgtacgtgtgcatgtgtctttataatagaacgaattatatttatttgggtcaatacccagtaatgggattgctggatcaaatggtagttctgtgaaatgtaatatgtttcattgtacatatgttttcttactgctcccatcaattgactgcttctttcctttagtacacatggactgttcaaaggtaaggagcatatgttgtcatctgtttgcacagagagctcattacatgtctttaactgatatttattatctttatttcctcccatctcatactttccccagttcctcttttattgctgtagagtccaagcaaaatctctttgatcctcttatttaaatattgggcctaagtttatgatacatttcttaaatcactctttgctttgggccttttagggaagggctccccttggctctttttcacaagtgaagaaataaagcaggcaagagcccctgcctcaagtctgtctcatctctctatcttcttagctgagtgcttttagaaaagaaaaccaggccagcggataaattcttcccatttccatttttatttatagggagaaaaatggctgtggttttttcctttcctctttgaagtttgcttccagttcttcagtttatttgaaatatagtatacttcttggttttccttttgtaataaacaacactaggttttaaatctgtggagctgtaaatgagaggagcttcagcctcctcttcttcagagctgatatggggaaggtaagggaagaggagaatcagatgatgattggaaacaattacacaaccattccattttgctaatgcttgaatccaggataattttctcatttaattctctgaaatgaagggcccctctgttagccttaaaatgtaaacaagaggcttttaatgcatgattttcccagaaatggaatgctagctgctcatattgattcaaaacattgctgttggcttttgttctttttggtatttgtaagttttgtgatgggggcaatataggattgttcatgtgtggcttgaggattgtcagtaagtggtattattattctaagttgcaaacagaaattaaaaaggacattcagagaacgcttgcctgagccctccattagtctgtccacatacaaaagggaaaatggaaatctgaggcatatatcccaattatttcaatttatacccacctcttggaactcaattctctgagtttggtattcagaccaaagtgtagtttgtttgaatgatgcagataatagctttaagtccactttattccagcctgtctggaccaggcatttctaaaatttataagttagcaacagtggaaggaaactgaagctttaacatgctctcctttggactgaaaaacttctgcatagcattggatcccaatgcctcattgcacttaataactgcaactgaatttgtatcatgttttactttgatcttcttatgaaagagtcattctcatctccatttttggagggagagaagtgaaatggctcatccaaggttacacacagcctggtggtagtaaggctgggattcaaacccaggtctcccaacctttaacccaaagctctacttactatgccatgccttcctctatgattaggtaaaacggctcaggggaggtggtgaaggtaaagaaacacacatgcagttctccttctacacctcccatcccacccccagctgctaccacctagtttcctcaaggatgacactgaataatgagtattgatcaatccaacactaaacagggttctgattctgtgagttgccctaaatacgggccccttatttgccttcagcaaacactcactcattcatctaacacttactaagatcctactggataacaggcattgtgctaggaactgtaggagacatgacttgattgagattggatatctcaccccaggctctcactgtctgatgaggaaaaggtagcgaatggcttgaagtcatgattgctgtttgctagccaactgcaatgcgatggggaagcccaaccgactatagttgaataaaaaaatgaaagaagtgaatgattggactaaagactcaaccactgagttgactaatgctcattattgtttaattctgaggttctaggactgagatttcttttcagtcccctgggactgtaacttataaaaccacaacaaacatcaatcaatcattaaacagaccaagctatccaggtcttggattttctatttaaggccaacttaagggagttaacaaactcagagggtggctgcctcaagctagcagaatctagaaattggtaataattgccctgcactcatgagccggagtgagtggggctggaataacactggcgttggagtcagacaggtccatgctggggccttgcctctgttggagacacactagctgggtgagctacatggagctcctattttctcatctgtaaaatggggacaatgcaatccattgaataggttttggtaaggattaaataaattctcagtatgatgcctaggatctagcaggagttcaatgtacattgcatatctctcacaattaatattccactctctcactccccttcacaccaataatttctgtccctttaaaaaaatatgttatagtgaccctggctgctgagaagactctatttgagtatgtgaccatggactagctaataaagagataaaagtgtaggagttcctggttaagtagagattgagagtcatgaaaccatggaattctatgagtctctagaggagactggcatgagggaataagggattctgtatggtgtgatgtaaatgagagacagtgggtcagggatgatagccctggaagggtgtgggaggtgctgaccaatctgataggtgtcctgagcacttataaatccatgtgaattcagatgtcatcgaattggaaatggtgtcaaaggatgtgagacacagatcttcatagtcacaacgttactggactcatttttcctcttgcatgaatttgaagtagagcactttcctaaaaatcttgctttatttatgtaatgtgtgtgtgtgtgtatatatatattttatatatgtatacatgtatatgtgtatatatattttatatatgtatacatgtatatgtgtacatatattttatatatgtgtgtgtgtgtgtgtgtgcatatatacgtaaatattttttaaagatgagcgtcttgttatgttgcccaggctggccttgaactcctgggctgaagcagtccttccatctcagtgtcccgagtagctgggactgcaggtgcatgcccagcacccagctaggaatccttctttaaagactgtcaagattatccagtacagaggcagcttcgtcagccagaagcttttttatttgctgctcctttcatcaccaggatgaagaggtgggtgcacagtcttccaacagcccaaactgcattcatctggtgtggcactgcaaatgtaatcattctaagcattaggaaacaaatcaaattttgggtcccaattcaattggccatatatgcatttttatttttctaaaagcactttctaaggagctggattggctttttatttttcccaaagcatttctaaggagctggatttaatgagcaagctagcaatgaggaggccagccagcagctgcaggcaagtgcagtggggtaactaagggtgcaagtacctttcagaacacactatttatgtcctagtagctttcagaaggcgtgatgataggctatctcagtggccatttcctgccatcggagagatgttgatgggagtctttcattacttgccagttgaggccaggaaatggtctctatgattacaccctaatttgataaaccctaaaatgaatctattgctgtctcactcaaatgctccaaaatgcatatgcttacacaggtatgtagcacatctaatccatcagcaggtcatgtcgactctgccttcaaaaaataacccatgttcatcgacttccctctgtacttgcacccttgtctctactgctgcaaatgaatcaagcttttgtcttctctcccctgcactgttatagtaaggaagcaggatagtttaataggtatgaatatgggctctggaatcatatttcctgagtttaatgcagctctgcttactagctgtgtgattttaggcaagttactgaacctctctaggcttcagttccctcatctgtaaaataggtataatgatatacttcatagagagaatgcctggtagacagtcagggtgcaataagtacaagaccccttctttacctctacagaaagcctcctcagtgttttcccaccttcctctctaggtccgccattaaaaacacaaaaatgaaaagtgtttatcactacccaggaatcaaactttttaccatgggccccagggcctgatgagacctggccctggcaacttctccaaatttatcatctcacattaaacccctgtttcctgcaatccagccacatttgtgtccacatcattcctccaagttctgcagatttccaccccagagcctttccatgccctttcctctccaagtgtgcctccctgaaatcagtgcatgcagctgccttctccccgttcaggtctcagcttaagtgtgcccggctcagcgaggccttcgttgactgcactgtatgaagtggtcttcacaggcccctagattctcttcatcctgtcacctggttaatttccttgctggtagttatcagcgcccattgttgtaacatcagctctcatggcccccaactccagcacctgcctcccagggctgccctcgggctgcaggaccctacttttcccgggaactggaaccaccgaaagcgcagtccacccgccgggtctgaacattccaggttcatcacccctggagtctacactgtctccagaactcctcataggattgagttcaaaagttaccttttgtgaggcttgcttgatttttgtactcggcttggcctccttccctccacttccccactcctcttgcatatttttctggaacatctcctaataagtcctcttcatccaaacttcatgttagagtttgcttctggagtatctaacctaagacaactattatcttgtttatttaattatttatagcactttagcactttactagaatataatatccatgagaacagtgagtattgactatgtgtgtatgcatatatatgtatatatatttaaacatacatgtttaaggatataaatatattgcatgtcgactctcagagctttcaaattatatttataatcagtgtgactttttgggatacaaacatattcacatcctgttaaaagttatttactttagctgggcacagtggctcatatctgtaatcccagcactctgggaggccgaggcgggcggatcacgaggtcaggagatcgagaccatcctggctaacacggtgaaacccgtctctactaaaaatacaaaaaattagctgggtgtggtggcaggcgcctgtagtcccagctacttgggaggctgaggcagcagaatggcatgaacctgggaggcgaagcttgcagtgagcagagatcgcgccactgcactccagcctgggtgacagagcgagactctgtctcaaacaaacacacaaaaaagttctttactttgggaggccaaggtgtgtggattgcttaagcccaggagtttgagaccagcctgcaacataccaagaccccatccctacacacacatatacagtaacagttccatcagttacatgtcagtccaccctccctgctgtctctgtgtctctaaatggcatgagccaacttatagggtatttgcttattaggtttagtgcaaaatcactttttacgttcaatataaaggatatatggtaaaagcaagagcttggtttggactttcgatggatatctagtataaagttctggaagtacatttttccttaaggatttaccgcctaactatattttctcccttctaagatacctggagagaattttaaccaggtgctgagttctaacatttctaaataggccgggtttgtttagctgggagatacattttggtccccgaggggttcataaagtggagacgtagatggcgccggaggctcgccagagggctgcaggtgatgattctgggtgttgtaatgaggcatgtttctgggggtgaggcaagtgactcatggggagctgctgaagaatgcgttgggggaaaatgctagtgaagttgtaaaaggcttgtaacctgatctggaatatgaaatttgtgggtagttattgatttcccagtgggcggaattagttttcttcgtgatatgctggctggaggagggaggttgtgagaacaaattgctaactgtcagactagaatcatgtctatggagatctccctttgtgtccagttgatccaaccaagtggctttcaacatctgcaaatgctcgcaaaccgaacagaagaaaagcagcctggcagagcagagctggatttacactggtcagccctgcctgggagaattttgggtttcaattacacagggagggcagggtgagctgtgatatctatagcatcccccgccccttccccattgccagtcctccgagagagttgagctgaggagaattcgactttcagtcaataggaacttggccaaagccgaatgaatttcaccttaaagtctgtgaaaaatggaacaggattgaagagtcgattaacccgtgctggtgacaaagtctggggctggttatgagtggaatgagattccaagtgcaggctgccacagtcaggcttagaaacgtgggcactcatgctgaggatgtgactgagccctgacacagatgcattgcttgtgtttaaccctcttccccaacactaagagaggggctagagaagtaccgtgcactacactccagaatgtcctaaaatctgtattctgatggtgggaccaggatgtacctgggttcacagattggcaagcatttccctagcagggatatagtgtccatcttgtcttatgttttatgagtgattctttgggttctccttctctcaacatgagtttcatggaggagaggggtaatggcatatcccatggaaattgcattatatcaaaaggccactgctgaccttctattatttctgggtgagtgcatgtggattggtgtagggctggtcctgaactggtacctctcaaaaaacctggagggatgatggtgtaccccaactacagcttgggccttactttcatttatgggatgacagcaagaatctcactggttttcctgttacatagacaatgaccatatcgtgtgataaatagtaagatggaaatatatcgaaatatattctgggtgctataggaatgaagaagagtcacccaaggcaaaggcggggtgtcaggaaaatcatcctagaggatttgacatctaagttaacagctagaagggaaggagtcaggagaagatggctgggacaagagtattctaggcaaagaaaataacatgcaaaaattcaggagaaggagagagtttgtggttggaacagagagagggaggtggaggagtggaaagtggtgagcgcccacgatgagttaagggaagagcttgctcacagatggcctccagccatgccagagagttgaaaaaactcattctgagggcaataggaagttactgaagaatttcctgaccacaagggactcctgtgcagggagcaggtagggtggttaggagacttgacacagaacatgaaggaagttggcttgagggtagaatggacataacttcatgatggattagatgctgatgtaaagagaagaactgaaagatgatttctttgcttggttgactgtgtgactgggggtgtcctcactcttgagagacagcaaaggagaaagaacagacttgtggggaagagggtcaattcagatatggtttttagaagtgttttctgctggagctggattgtggctgtgattgcagatgtgattttggctggatgcacctcaaggtggttttccaaagtgacaaagaattttcatttagttcttccaatggagctgatactggcgaggagcaggtgaaaaaagggtcctcttatttgaagtgtccctgagccatcaaataattgcaaaagcacaccacacttcaagagggctttgcattcaggtaggtagcactgaccgccacatgacaaaactttcctaagggaggacccagaacccagaaataccgcattttcctctctgcagtcacttggacaaagaaaaccctttcaattaaaacccaaagagttgagtagttctgcagattcccccatggctggtctgaattataatttggacttgtcactcggtggtaagtctcccagcctttgtcagacattggatacctaaggcaggaacccagcctgggtgtgcaggtctctgacattcattacctctgcctatgaagatttatttcagggtgtgaactatttatcttcaaaaccatttgtgtttgttggcttgacaatcaagcagcaatttggaaatgctgcttcctgaagctttacgactaatataatttcacagctccaattacaaatgagaaaaattatttcatctacaaacaggagccagacatttctgagaaatcatggttaaagagaagacagagtaccttctgaaaaacaggccatgttattaatggtctcttcagtgaaaatcttgctgactctccacaccatgagcctccatcttatggggatgctggttttgagaatctgtaaagcagctgcctttcaggttgataaaccattgcttctcctagtgcctggtctgcagctcccacagcctcagtactctgtgagcaaggcaaacacccactgtctttccacctagcaaatatatccttcctcctgcaacttcctcggaacctatgttttatagaatcctagaattttgcatgtggccttaataatcattcagttcatcccttcatctgatactttacctcttccttgtgcctatctataggcaacctactacttgtatacttctaggaatggagaacttactgccagactttcccgtgaaaaatctactagcttagttcaattttaagtgggatttaaagtctggtgacttaccaaggagatctttcatatctaaaatctcctaagtggctttttccttggattcatatcttagtaatgggatttatgtgcggtatctcaactagagtgctaacagaatgaccttttaaggaaaaccctgacctcagttattccacagctctgttttatgaccactcctaataggttgccactcctaagatgtaaaggtactaagtgtttttcctgtctactcaagtctgcttcttatctctgttggctccgtgcagtgctgggtagttaacccttggtcattcctttccaccctagaatagtgactggcacatagtaagccttccataaatgtgtagaatgactgactgaaagagtcagttaaatgtgtgaatgggttagctcttgatctgcctttacatagttccttcctgtaggtcctactgacctcattttacaggtggagaaagttttaaataatttttaatcttgagccacaaaaagctattttaagccttaaaacattgtcatcttgtactttaagctcaaggcaattgaccacgcttgatttgtttcttactaccttgcttcaagagtttatcaaatctttagcttcagcagaatccaaatacgttatgtcagaagctgggaatctaggggacaacctgcgcactcttatactcattgtcatcacctggattgtcatcaccctggcatcttcactgcagtgacacagatttcctgaaggcacatcttttggtgactcccttttacccagaggactgtggaaaaacaagactttctgttgtattttaaatctccttttttagaatctcttattttacttttcaaagaggaagactttaccactttatctaacttagtaagataatgcacaatttttatcttctggttgggcttaattatcacatcaatgaaggcataattgggaagctaagtatcattaagttagggaagttattcgtatcccaatgacaaagcatttaccacttcagatgaactcacctggtttttctacaacaagaatttcaacacctaatttccctctagcaaacaaaagattgcaaaattacaagttcacatccttttgaagataacttttagccaggcaaaagaaaaaagagaagataacttttaaaataaactttttaatgaatattgtaagacatttttttaccctgcttaataaatacatctggatgaaaatctcaactttatgatggcaagatatggactaaatatttaacttaagtaatagggtaattgataaagtaatagatatattttctccaactttcttccttatctttctaaacaaagggtagtggctaatcaatgtattgtactctcaaaagtccttaggccaacgagttggtttttttttcttttgagacagggtctcactctgtcgcccaggctggtgtgtagcggtgtgatcatggctaactgcagcctttacttcctgggctctgatcttctcacttcagcctcctgagtagctgggactacaggcatccatcactatgcccagctaatttttaaatttttggtagagatggggtcttcctatgttgcccaggctggtcttgaactcctgggctcaagttatcctactgcctccacctcccaaagtgctgcaattataggagtgagctaccatgctcagccccaacaatatcttcagtccaaatttctcataaagtgtcattaaagctgtggcctatgattttatctacaattttaagcaaagcagaatcaaaatttttgtcatctataattttctgtttccatagaactgacacttccattgcaattaagaacacttcttttaagtgttatctttcattattctccttccaagagaatataaccctagatttatattctctaaaccaccagtgttccctaaatcctcactcttcctattgcaatattatccacttgtcacggactgtctcaaatgccacctcctccattcattcagccaagatttactgactcactgctatgaaccaggtactgtatcaggcacttgaatattagttcagctctcatggagcttaatctttagtgggatgaatggacattaattacgtttattggaatttaattaaaaactgagatttggctctgagagaagggatatactcttattagatcctataaagtcttctatgaaccttctgaccagagctcatgagagggcttctgaagcattcaatttgttttgtgactctgtaagttgggactctttggtttcaagcaacagaatcctactctggtaaatttaagtaaaaacaaatgtatttagaagaaagggaataatccatagaatcagaggaaatgctgaggaactagttatcggagaggagagactcagaatcttggagggagaggggactcagcatgtgcccctgggcagcctccttggggcacttctgggatgaaagcggagcctgagagactacatatttcttttttctttttcttttttcttttctttctttcttttttttttttttttttttttgagatggagtctagctctgttgcccaggctggagtgcagttgtgtgaccttggctcactgcaatttctgcctccctggtttaagcttctgccgggcttaagctattctcctgcctcagcctcctgagtcgctgggattacaggtgcctgccaccatgcccagatagttttgggttttttttttttttttttaagtagacttggggtttcaccatattggccaggctggtctgacactcctgacctcaagtgatccacctgccttagcctcccaaagtgctgagattacaggcgtaggccaccatgcccagccaagactgcacatttcatgtagtgcttaaaagcacagtctctgcagtcgggctggatttaccacttactagctgtgtacacatgacaagtccctttgtttcctcatcagcaaaacggggaaataatagtgtctacctcccttagtcactaggagaatttactgagatgattcatgcacgacacttgcaacagtgcctagcacattgtaagcactcaaaatactgtgtattagtaccgttggcagttatcattatgaacgttccctcaagattcagatttcaggaggccatcctaattggggccaggtgtccagcccttctccaggggaaggcagggagcctatgacagcttctcaggattatagcccatgacagtatgactcccccacgtacagtcagggtgctgtgccagaaggagtgggtgtagctcttgggctgacagaataagagatgtcctctacctcttctgacctttgtcttattctaatttctgccattgttcattggttttgcttttttttttttttcctgtaatcacctctgtcagtttttaagtacctaatgggcagaaccacatcttatctctgtaccttgataaggagagtatcttcacattaaagatgtccaacatctatttgttagatttaaaatgatatcctggtgtgtatgattcatattgcagctcaagcagcatctgagtcggggcagcttgacacatgtttggattttttttttttcctcaaggttttctgttttcaagggaaatatggagacaaagctgcgaagggcttcagaaccttccagaaatttccctgaaacagcaatgtcaagagacatacccttctctgcaaaagttttaatttctttctttctttttttgagatgcagtctcactctgttacccaggctggagtgcagtggcaccatctcagctcactgcaacctccatttcctgggttcaagtgattctcctgcctcagcctcccaaagagctgggattacaggcgcatgtcaccatgcccaactaattttagtatttctagtagagacaggttttcgccacgttggccatgctggtaaatgaaagcaatgtgcagaaggatgcaagtggaaggttgttcattttgtactgtctgtaccagagaagaatgttcagtagtacaggtatggctgaatagaaaaatacatccatgataaggagtactataaaacagttaaaaataactaagttggtccctaaatgtgataatacagaaagtgctccaagaaatattagtgagtgaaaaaaaatcaaggttcagagtaatatatacatcatggtccccttgtataaaatggaaacaaagccaaaataactatatgttttatactgataaacacataagtaaaattgtataaaagggtcttggaagtttatagtgacagtaatagacttaaatgaaatgcaaagttaaaataacactagatatttcatatggcacatttttatatgtatgtgtatatataaaatatatagaacatactagaatatacagaataaaataactggttgcctctgggtaggaagggttagaaaagggactagaattgtgaatgatgttctcaggaaatcttaacctaatctttaatattttaattttttacaaggagaatgtcttcatgaactatttatttaatgaaacattgtatgcatatatgaaagaaaagaaactaaaaaatgaggaattctacactactctgaactgtctttattccagaatgccgggacattctgcttcctgtcatcaccaaagagctgaaggagctgctggagcagaaggatgacatgcaacaccaggtcctggagaggaagtactgcgttgaattgctcaacagcatcttggaagtccttagctaccaggatgcggtgagtcctcctgatgatgtagatatcctggactcagactagggctaagttgattacattgtgaaatattgatactgatggatagcagctggagtctaaagataaaagtcaacggcttgctcagcaggcctacttttcctgtgactaacccccattgctgtgaaggatggctaggggactggagttaatcatgttagcattttgtctctgtgtgtcttgttggccaggctttctcagaatgtgggtatagacattattgcagccttttaagatggcttgtccacgtactcacgccctagtttgcaggggtgggaggaggagtttcctatgcctagacagcaagaaaactctcgtgtctgctttcttagctgatttacttcggttttgtttcttcagttaccttctgaaatgacaaaaatgattaagcctcttcctggatgagcagattgctggggctcagattccagagatagggtgtggagtaggatggtggtagggagatgcctgtggccgtgaagttactgtgtattttgtagacgtcattcagagattagctggggacggaaaccaaaggaaagtctcagtgggagtaagtggagggcttccaaagggctgaatctgcagaagataagccagatggggtggtgaagactgagaggtagtgattagacccaggcctggaattcttaagcattggaagatggaaggagggtgctggatctgacccaggttcctctggcagctcctctttgtccttgagtaatgtccaggaggtattcagtccttagatgggactggcttcagaggactacatagacccaaacaaccaatacatttttttctaagcatttgtgtgagcattgcccctttctctctcctccctagaacatcctcagagaagagctttctgaatgaactgtgtctattattgactgtaattcgaaaactctgcagagcaatgttcctttactggtcagatccatagtcaaccattatgatcaatttccttgcatactgtcttctcctgtctcttcctttctacacttaccatcccaattaagccgcttcttgtcttattactacatatgcatagcttgcttcattcattcatgcagaaatattaatacatatgacatacccggtgtgcgctaggcactgggaacaagaaaacctatccccaatatataacgactaaaatctagatgcatatttggggtacaagagctacaaagtgtgtgtgtgtgtgtgtgtgtgtgtgtgtgtgtgtgtgtgtgtgtgtgcgcgcgcgcgtgcgcgtaagcatttttgtcaaggaagcctacacaaaggaggtgaagcttcagctagtgttcagtggtgaataattaatgatcatatctctatttgttggtttctaggcactgtgctaaatgcaatctgcgcattctctctgctcaccctgatcctagatactaaggcttattattcccattttagagatgaaaaacctgaaattcatagacttcattagcattcaaggccaaataaatagagcaaataaatgtcagggtcaaaattcaaacacaggtcagtctgattcagactctgtgtaatcacaggcataggggatacaaaggcatggtctttttctttctactcctacctcatttaatggaaagacagtataataaccaaaagcttagatattctagattcattcagatgatgatgttagggtgatgatgtttctataaggacattcagtagccagctgttgagctggttccagtcttagctatttgatctttttaaaaattgtttttttaaagggagatttcagtcttactcatagtgtagaaacatgagggtttgtctattatttctgtggtaacatcctatataatgttgcctcagccagggaggttgatcatgcctgtgatcccagcattttgggtagcccagggaggaggattacttgaggccaggagtttgagaccagcctgggcaacattgcaagacctctgtctctacaaaaaaaaaaaaaaaaaggaaagaaaagaaaagaaatttgccgggtgtggtggcatgtacctatagtcctagctgcttgagaggctgaggtgaggggattccttgagcccaggagttcaaggtttccatgagctatgatcttgccactgcacttcagcccaggtgacagaacagaccctgactctctgtcttaaaaaaaaatttgcctctttctgttgaaaagccaatccacagtgttttttacattttagtaatgctcagatccctttaaatggggaaaaaaatgtgggtccttgggaatatgccagtggcccccagtttgggggatccagttataatgtgctaattgtcaagttcctggtttggtggaaagatggccccagttcacagttatttgtgaagcaggatgctgaggctctgcccatcccaggggagtggccccctagagctctaccctgacaggctgtcacccttttgcacattccctgacatcagacactggtgagaagaggctgcttgctgtcttacacaccctcgatacttagggcttcaaagccaagaagtgagtgggaggctctgagctccccgtgggggattgtggcatctggacttgaggtgtgtgggaggtgcgtgtcactctttaccgcctctgagtgcagtgctcttataatgaattctgactgtggggactaacccacccctttctccgggtgagcaactgtctttgctggatgagttattaaatactgttatcaccattgaatttggtagaaattttgatgcttttggtgagcttcacatctcacctctcctgctcatgaagatggaaatctctcttcttttctcaaaagcttcttcaatgaataggaggcattcagtagccatgattactttgagctaaactgaaaatgagaggcccaaaagtacctaaatttctcatgttctaatatatagcggctctcaacattgcctcattgcctgcatagtcatatcacctcgagagttttttttttttttttttttgagccaggtttctgcttctgcctcctgagtagatacaactataggtaccagccaccacacttggttaattagttaattaattaattaatttgtagagatggggtttcactatattgcccaggctggtctcaaacccctggcctcaagtgatcctcctgccttggcctcccaaagtgctgggattacaagccacccggggagctttttaaaagtcaaactagcaggagtcagccaaatgggtaggaagatggggtgggtccccggtgaaaccccatctccaagccgaagagtttaaaacctgaaagtcaagctgtatgttaaatcctcagactggattgagaacttgtcctaccatttggcacactttcctctgattgatccccacccttcgcttattttacataaacttaccttttcctaattggttttctacactgtcatgcccacctttgagtggtgtcttccctttaacctttttttgcgtactaacaaacaaatcggcagtccccattctgagtctataaaaggccccagacccagtcacacaaggtgtggggagggacggggaggggacaactttccaatcttggggtaggggaaccagtgccccacctccaccccccaccatccccccgcccccccactgaaagccgttttcactgctcaagaaaattattctccgccctcctcacccttcaatgccccacgtatcctcattcttcttgggtgcggcacaagagatccggaaccgctgaatatgggtacaagctataacatagttggtgagctggatgggctgagtgagacctgggcagggcgtcactggctgggggtccccggcttgcaaagcgactgagaagaaaaatcttgcatcaaaagcagtaatacctaggcccctgtcccaagtattctgactgaattggtctggggtgggtggggcactgcaatgaaaaggtgatgattaccaggtgatgctaactgtcagccagcatgaagagccacaggtgttgagcaggtctcaaacctgagcaggcacccccagtaacctggaggagctgttaaaacacgtttctgatcattagtctggacggtggggtcctggcgtccagtaacttatttttctagcaagttcccaggtgctgttgatgctaccaatgtagaggccatgctcagaaaccattgctctaatatgacctgtctttttttttcctttagtattcactggaaatagaggaatagctgggctcattctcagttctttaccttcttaatttaagaaccctgtccagtctataaaatctagcatcttccggctgggtgcatgtggctcacgcctgtaatcccagcactttgggaggccgaggcgggcggatcacgaggtcaggagatcgagaccatcctggctaatacggtgaaaccccgtctctactaaaaaaatacaaaaaattagctgggcgtggtggtgggcgcctgtagtcccagctactctggaggctgaggcaggagaatggcgtgaatctgggaggtggagcttgcagtgagccgagatcatggcactgcaatccagcctgggagacagagcaagactctgtctcaaaaaaaaaaaaaaaaaaaaaaaaaatctagcatcttccaatatgcatttaataaaccacaaaatggcaaatatttcaaacacattaatttgtactcatgaattcatcttcatgggatagaagggacatggaatatgcaaagatccaactttgaaaatccagactgtagaatgtgctgtttgctttctacaggcaccaacttctcaaaattgaacacttagatgaaaactaataaaaaaggcccccagagcaaatgttctggatttttctcctggttgtttggaccttctctgctgacaagagcatagccatttttactggcttttagttggcatcatggaacaacccattgatgttccatggaacatccaagaatagagactatgtccacctactggaggcattgcccagggtagaaccacgtgtggaaatttagcaattacagtgcaggatgccaagcttccatttggggggcgctgtgtgtttggggaatgggacaggatgcttgtcttcaatagattgtcattgtttgggtaattacagcccagagcagcaagccaaccttattctttgaaaccctgggtgtcatggtaggactcagggggagatgtctgccttagcctggctgttgatttttttttaatcatagtgttgaattccctcacccagcttgctcctggtctcttagcatatgaaagggaccagctcaggtgaaggataaaaggcctgacttcttcctctattaactccttttctcccccctcactgagcaagtttagttgtcaactccagttactttgaagggcggtttcacactgcttcgttctgtgctttgctggctgccgagtaactgataaaatttaatattgctccagacccagagagagttggtttttcccctcttaagacagggtttttgtttttatgtttcattcctcaagaaaaaggagagtcgttgtttgctactctgcttagcagtcttaaagtgggtaaagatgactcctaattctcaagaagaaaaggtgttggctgcatctgaatcgtggacataaggaattctcagaatcatctttttttaaaaaagtatttgagtctattggctaaacctgggtggggggctaccaaggtactctcagtcatgaatggtttaagggttctgattttttttttttctttgagataaggtctcactctgttgcccaggctggagtgcagtggcgcaatctcagctgactgcaacctccacctcctggctcaagcaattcttgtgcctcagctggctgagtagctgagattacaggtgccagccactgctcccagctaatttttgtatttttagtagagacggcattttaccatgttggccaggctggtcccgaactcctgaccttaagtgatctgcccacctccacctcccaaagtgctgggattacaggcatgagccactgcgcccggccaggttttgatgtttttgttcacaacttagacatcagttgggaggcttttgcttttgcttagtgcagtgtctcttgcttggaatgctcttccaatttctcatctttctctgcaggtagaatcctaaactcgtttggagttcagctcagataacacttcctttctgagattttctcaattccattcccacttccttctcctccgctctgcccccaggcagaattagggacttccttgtctgtgttttcagaaccatgtgtgcaccctgatatcccagcgccagtcattttgtgttactctctcctgtgtaacaggaggctttgagtgtggaagctcagggagcttccctgagccacaggtgtagagcaggtctcaaacctgagcttccacactgacttcgcagagtttacgctttcagcttcagtctctcccatcccacttgaactgtctattctctggttccattaaaatcctttcagttcctcacttgtgcagcaccctctcacttctcactgcggcggagtgccgttcacactgcctgaatgcatcacctctgctcttagcctagctaaatcctaccttcccctcagaaatcaggttaaatgtgactctcctgagaagccttctctaatcctcttctccatgtctcttgtggtccaaggagcagcttgtgcttgctccattgtggcacctgtgttgtcaccctctgtggacttttctgtctgcctgcagaaaccagagtgctatgaggagagagatcttgctgctctaccccccgcccaccccagcacaatgcctggctcttgaagctatctgaaggaaggaataaatgaatgaatatgtctcgctccaattaatggcagggcctgatttctccctggggtcttgtgcgctgagtgctagcagggtattcttctttttgccttcttttcttgtgcgctgagtgctagcagggtattcttctttttgccttctttagatgtcaggtgcagagggttgaattaatcacactcctgagttcataacacatcatcttcattggtctgtgcaagatcctcccctgttctgtgtgtgtatatgcgtgtgcattttgtcataaaacaaaattgtatcaaattgattttagtgttctaattgactcttactagtgattcatgagtcaggcattcgtatctaaaagacagaaggagctctcttgggcgcagcaaagcagttggttattgtaaggtagcttgagtaggaaaaaggaaatgggatgatacaaaaaggtgggttggttaacatcaggttacttcaggttactttccttgtaagagttaaagcagggggacttccttatcatgccagctcaaatgaccatgccctttccaactggttgctgtgaaccttctgtttttaagaaagactggtctctttgggggattttcctgcttccttaaagttcccattttagtatgtcgcacttagcgcaagcgactccatcttggtttgatctgggcctagtgcaggagctcagtccaaaacaatggactcctatgattttattgaacaatttcttaccctttatccccgtcttctactcccattccacatgccccccaccccccatgaatgatttgtctaatgcgttgaatatgcacgtgtggttttgggtgcatgtatgtttacacacacacacacagactctctctctctctctacacacacacacacacacacacacacacacacactcatgcctctcctttgaagaggatcagatatggacagcaaagggcattagcatcttagctgtgttagaatcccgatgggaggggaggggactgcggcatgagcatgaatcctccagactagagggcattcttggtggagtcctgcccctgacctgcgtgtgggaaagcagtccaccctgcctgtctacgcttgggcgccttcttctgaagtgcatcccctgtggccactctgagctctgggttctctgataaacctaggcagtttgcctgctgcagggtggaagggaggctgccactgcctctttgcattactatttaattcccaggaatcaataccaccctgcaagagcagcagggttttcttctaacctatctgctccctcatatttgaaataaaaggcagggagacaaggcttgctgaaattcttttgtctatggtgcatgccagagagcagctaattaagccccaaacctgaggttgaaatacatgagatcactgcaccttctgctgtgaccaaggctgctttgttttcaccccttgcttttcctctggcttccgtggagttagaaatgccctcctgaggccaatggcacaacttctatggatgactgtataccacacacttccccagcaccttctaactggcagtgtgtgttcttatacgacacagttgtttgtttctggtgccaaagtggcaaggtagatcttactatccccatttaactggcgaggaggctgagtctcagagaggctaggtgacattcccaactcaacagcctctcaggcaccacgttacctccccccactctgcatctacacatcgccagttaacagcactttcacctgcaccatttccctggaggagcctctacaggctttaagtcagactgcatcttgtatccattccacaaatatttagaaattgcctaacatgtgctctattctgtatgctggggctacggctgtgagcagagcaggggataaattctagctctgctgttattagctgtgggacattgagaagtcatctaacttcccaaccccagaatgggtcctcaaccctgggtccatggcctgttaggaaccaggcttcacagcaggaggtgagcagctggagagcgagtaaaacttcatctgtatttacagtcactccgcatggcttgcattactgcctgagctccgcctccttcagatcagcgacggcattaaattctcataggaacgcgaaccctattgtgaactgcacatgagaggagtctagggtgcatgctccttatgagaatctaatgcctaatgatctgtcactgtctcctatccccctgagacgggactgtctagttgcaggaatacaagctcagggctcccactgattccacattatgttgagttgtgtaattatttcattatgtattacaaggtaatataataatagaaataaagtgcacggtaaatgtaatgcacttgaattatccaaaaaccacctgccccaccatccgttttgtgaaaaaattgtcttccatgaaactggtccctggtgccaaaaaggctagggatggctgctctaacctgtctgtatgatgaggatactcttttcccaggtgtgtcagaattacagtaaacaagaacacctgtgaaaacatccagccttatgcctggcaaataatctgcactctatgcacgtggctttccttcttccctcactgttccgattcactcatatgctctttctgctgttccaggctgcttctaaaacatccctataattcttttaaggacagtacagggtcaagtggcttcctgggagaatgcaaggcaggcactgagcctggagagaactctgtagccccattagtattgagggcaacccccaagccagccctggtggcagccagatggtttggagccctcgcagtctccacagaaggcttgccgggaagcggcagatgctgctgctggaggcaggccttccctgcagggcatctggacctcataggaattcctggagcgactggagaaaggtgtcttcctgtcctttcaggggctcctgcggggaattccagaacttcagggctcctgatcaccactgtacagggcagtgagctggagctggctctttccagctcacaagaaccgagtattaaatgtttaggaattttgtgaggcaattgttaaataaccgttatcatcaaaaattgttataaatctataattaaataaactatattaaaatctaaggtaataagatctcaaaactcaaaaacttcccgatgagctggctccattttatttttatctaccctcttgaggttatttacatctattgtgtctgtgtggtggaaatactgtctccagctctgctgctgtgccttgaaatcaaccagaaagggggtgttaatgccacagaaattggaaaacgttgcatatatccaggactttatttttttctttctggaaaaacaatggacaaacatctaccagcacacccctgccagggactcaaaacaatggccccaaacaagaaaaatccagagacccaagggagatgcctgtgcaattctcttcccctagtggaccctaaatctgccaccctttaagggttctcaagggacttggcaaagccagtatgctccagggatgtagtgtttttaagaaaaactaaacacccaacatagaccaaggaggggagatatgtttcatttctcatgatagttctcattgatctgctgtggcttctttcctaatagcattgagaatgtcgaggtctcctgcagggcagtgagaaagacagccttggttcctgcagtaggtgaggggtggggacaatgagttgggtaccatggatttgctatgcttaaactagatggccaatcccaaaatgtggggaaggtcactgtgacagggagattgtcgtctttcacctggtaggttttggccttaagtaggacataaaaattaggaaaagttgatttttgatttgacaaacaccaccagatttattgttacaaggaagaaccatcgatggttactaaaagtcatggacaaaaatctgataggaaacaggatatttgcataatctcaaagtgtcttcccaaagtatccactgattaatggcacagggaaagcagtagctttacagtggagacaactgatagaccttatcctaaccaaatgagcaaagggaaaccaccagcagggaaacatactgacgtcatgtgcctcctgacacgatgcactgagaaggactctacatctcttctatgggaatcttgccaaaaatgtacagcctcgatctgatgatgagaagacattagacaaaccctaactgaggagtgaaaaataccagtctagtcctcttcaacagttaaggtcatgaaagactgtggcactctcacagatttggaaatgtgacaactggattcaatgtgggatcctgaattgaatcatggacgagaaaatggatgttagaaggaaaactggcaaaattagaataaaggttacagtgtagttaatagcattggaccaatgtgaatttcctggtttgattattctactctggtaatgtaagaggttaacattaaccagtgctgggtgaagggtgcataggaactctctgtaccatctatgcaactcgctaggaattcaacattatttcaaaatttaaaatgtttttaagaagcttatttttgaagtatttaagggatgattactcacttatgaagaatgagggttgaaggtgaacagttctgtcaagtatacttatttctatgtgaagggaaattacacatagaaattagtgtaaaaacctgatagatacaggtttttctgatttatgagttaagacaacaaaatccagaaaggactagccttactagaaggttccatttgcaaaattcctaactgtctcaaccaatcagaaggccaatgtaacctcctaccaaatgaataattaggtaattgcatgactaaaccaacatttagcatgccataacccaggactaggctctggggaggtggaacatggaggagcataggagcctgtcctgttctcagggaccttgcagcctatagtatttcacgtgggctatttgacatccctagccatgtggtaagtcctaggccagggtataggacttgagtgtcacctgatctttgcctggcgggcatggaaaatggttggtttggcattgcttagggatggtctttgggttgtgtattcttggggaatccatctggaaaataagaagacagcttttgctcacagttgactagacctccccctagtaaagttaatgatccaccaggttctgttccatcagcatcagctagaaatacttcttaaggtattctttaatattgcattatctgccattaccaaagtttaaagaagtttgcctacagccaaatgcacgatggcctcacacactccctccttcctatcctcaatctcatacccttcttcactgcctctcagagccaggatgaggtgaggcatggcctgggaggaagggcagaatgtaatggggcaccaaaaattcagtaatcaaatcaaataatactttcacatgacattttaaaaactcagtattttgttattttgtttaccatgagtttttgcattaattttttaaacaaaaaaattgcattaagtgttaattttcttgattactgagttttttgggacccccttcaattttgccccctaggttagtgtctaacttgtatcactccttccccctagtcctggcccctgcacagtcctcttatcaacactggctgcctgcagtaacaaagctgggctctgacccataaatggcgtggcggcttggaggaatggagaaggtacccttctattcaccctccaagactgtagaggggctgcggaagatttctgtctgctgggaacccttgcataaaagcactagttgaaaggaacagccatttacactctaaaccttcactggggcagccacttggtttccaaaaagcatttcttgcatagtgtttgaattaaatctccccttcgaagttgggagacatgagttaaaagccctctcagcagcagataaatatagctatgtttggtccaggttacagttgctgagggaactataactttgatttgctctcctggtataaatgtaaatccttaagtgaaatgagttaagtgagggaggaggcgccctgtttttaaggatgcatttgatcagcagctgtctgtggtgcctcacctgccatgtacaatctgaggggcagcagccaaagactgcagcaaggaagcttccagcaaatgatctaagagttctagaatggacattttctcagggaggttttcagatcagttttgtcttagagataaacacaattggtttaacagtctgggttggaaaataaagtttaatttcagcacagtttctgcaagcaacctagcatgctaaagtcatctttgccctctatttattaccttgcctttggcctgaaatccaaactcagcttaattttcctctccaaccacatttccaactgttttctgcctgcagtttacattctagcacagccagactctcactctcccaccaaaccttcatgctctttcttctttctttgtcatttaccctattccttcactctggaagggattcttttttccctccttttcttttttttaatttttaatttttgtaggtacatagtaggtgtatgtatttatggggtacgtgagatgttttgatacaggcatggactgcgtaatcacagcatggaaaatggggtatccatgtcctcaagcaaccatcctttgtgttacagtcaatgcggttatattcttttagttatgttaaatgtgacaattaaattattgactatagtcaccctgtttttctcccttctgtctgtcctgaaagcctccaactggtggtttacaacctgaatctagcccacagatgtattgtgtttggcttgcagaattatttcctaaaacccacagtcccactcgttcctattgctttctagatgactgggttcacacttttatattatccatcctgcctatgtagacatctgaattgtgacctctgagagccagaccctgcctttcctaataggcccaattcttcctcgattaagaaatcaccccaggttcttttagctccgtctcactcaccacctcttctgcattctgaaaacttttggctttattgtagaatttagcacttaattatatgcagcttgacatttgctcttgtcatggtaggcctttctggcacatgttgagacaagcctaacactttttgttatttctcttttcaactgaagtaatatctttctatccaacagctcactaaacattagctaagcacctatgatttgtcaggtaccatgctaggcctttgggatgcaaaggtgttgaagacaagctcctctcttattagaaactaacttcggaccttatttcccagcacttggcctcagtggtctattcattatttcagaacacatctagtccttcctaagcctcactccctggttaacactcctcccactgctacaataaactttctttgaatagttaaatcatatttgtcttttgaagcctgggtcaatttcccttatatttgccttgccttgtctgtttcacagacatgtgtccacccctgtctcttggaaatttgacataggccatcatttacagaaagtgctcttctgtgggtgtcctgtttgttatttacagactctccaaggacagggctgatccagtcttacgtttctcccgtatttccacactgcctgggcatagtgccgaactccgagcagatactcaataattaatctccgtggtttgactgatcctcccatcttcaattagtctactttcaagaaatacatgctgacactaattttattttttatactcagtggaatccagtgagaaaggtaaatcttctgcttttgcattaaaacatcgcataaaaagcaggtaccaactttgagtactgctgggctcccaaagttgtttatacatcagtttagaattcagcctgcattttcccacagaaataatgccttggggttggtcacaccccaaggccagcctacgtgaacatgcgtaacccataatgttttgaactctggggcagagattagagctcacatgtacttctcattgcctgaagagtgtggaggttatatgcacttcaccttacctgacaatcaccacactgtgcccagctttacgatgtctgttttctcatctggatagtaacccctatgagcacaaaggccgtatcggtcttgttcactgccatatcctagcacagtgcccagcacatttattgagcagtcaataagtatttgttgatttggattgagttaaattctagttgaaagatgatggactttggagacacataggcatggatttgaattccaatgccatcactaactagccgggtggtactggggcctctctgagcctcagcttatctctccatgttttgttaattcataaaaccaagttgctgagtatgtggttaataccaaaatgttttttctttccttccttactgccttaatccctcaaaagcatctgattaattaattaatgatgtctctttttagccttctctggtggtgacagagaaggcaatatttgatgccagggcctttccgcagcttttgggaagtgttgggttctatttccagctctaattctaacagactgtgtgacctgagataggtcacgcaaacatatctttgagacagcaatgagagatttcagttatttccaggcttttccacataaatattaataatttcaggtgagtgaatataaatgctcaatgttctggggggcagagtccaaaggttgaatttatttgaattcagtcttatgtttcatcttaattattcatgcatactttatatttgtccaaatataaactttttgcttatacttcatcaaagggtacgtaaaaacagagacttcccacacctaatacagtcgtcaaatgtattagtagaaatgccttcgcttttatatctggggacaaggaatgacatgattcagtgaaggtaagtgtagttaacctttccagaaatacccgcaggagaccaattatttatctgcttaaaaactacccttggccaggcccgttggctcatgcctgtactcccagctactcaggacgttgaggaaggagaatcacttgaacctgggaggcagaggttgtagtgagccaagatcacgccattgcactccagcctgggcaacaagagcaaaactccatctcaaacaacaacaacaacaaaactttcctttgctggccagagtggctcacgcctttaataccagcactttgggaagccaaagctaggggattgcttgagctgaggaggttgaagctggtctgagaaacatggcaagaccctacacctacaaaaaattaaaaaattagctggtcatggtagcatgcacctgtagtcccggctactcaggaagctgaggtgggaggatcactggggcccagaagctagtggatgcagtgagctgtgatcacaccactgcactccagcctgggtgacagagcaagaccctgtctcgaaaaaaacaaaacagattgggttccaagatagccgaataggaacagctccagtctacatctcccagcgtgagcgacacagaagacgggtgatttctgcctttccaactgaggtaccgggttcatctcactgggacttgtcggacagtgagtgcaggacagtgggggcagcacaccgagcgtgcgctgaggcggggtgaggcatcacctcatccaggaaacgcaaggggtcagggaattccctttcctagccaagtaaagctgtgacagaaggcacctggaaaatcaggtcactcccaccctaatactgcacttttccaatgctcttagcaaacggcacaccaggagactatatcccgtgcctggcttggagggtcccatgcccatggagcctcgctcgttgctagcacagcagtctgagatcgaactgcaaggcaacagcgagactggtggaggggcgcccgccatagctgaggcttgagtaggtaaacaaagcagccaggaagctcaaactgggtggagcccaacgcagctcaaggaggcctgcatgcctctgtagactgcacctctgggggcaaggcatagccgaacaaaaggcagcagaaacctctgcagacttaagtgtccctgtctgacagctttgaagagagtagtggttctcccagcatggagtttgagatctgagaatggacagactgcctcctcaagtgggtccctgacccccaagtagcctaactgggaggcaccccccagtaggggcagactgacacctcacacagctgggtacccctctgagacaaaacttccagaggaacgatcaggcagcaacatttgctgttcagcaatattcactgttctgcagcctctgctgctggtacccaggcaaacaggtctggagtggacctccagcaaactccaacagacctgcagctgagggtcctgactgttaaaaggaaaactaacaaacagaatggacatccacatcaaaaccccatctgtacgtcaccatcatcaaagatcaaaggtagataaaaccacaaagatggggaaaaaacagagcagaaaaactgaaaattctaaaaatcagagcacctcttctcctccaaaggaaagcagctcctcaccagcaaaggaacaaagctggacagagaatgactttgacgagctgagagaagaaggcttcagacgatcaaactactctgagctaaaggaggaagttcgaaccaatggcaaagaagttaaaaaccttgaaaaaagattagatgaatggctaactagaataaccaatgcagagaagtccttaaaggacctgatggagctgaaaaccacggcacgagaactacgtgacgaatgcacaagcttcagtagccgattcaatcaactggaagaaagggtatctgtgatggaagatcaaatgaatgaaatgaagcgagcagagaagtttagagaaaaaagaataaaaagaaacaaacaaaccttcaaagaaatatgggactatgtgaaaagaccaaatctacgtctgattggtgtacctgaaagtgacgtagagaatgaaaccaagttggaaaacactctgcaggatattatccaggagaacttccccaacctagcaaggcaggccaacactcaaattccagaaatacagagaacgccacaaagatactcctcgagaagagcaactccaagacacataattgtcacattcaccaaagttgaaatgaaggaaaaaaatgttaagggcagccagagagaaaggtcgggttacccacaaagggaagcccatcagactaacagctgatctctcggcagaaactctacaagccagaagagagtgggggccaatattcaacattcttaaagaaaagaattttcaacccagaatttcatatccagccaaactaagcttcataagtgaaggagaaataaaatcctttacagacaagcaaatgctaagagattttgtcactgccaggcctgccctaaaagagctcctgaagtaagcactaaacatggaaaggaacaaccagtaccagccactgcaaaaacatgtcaaattgtaaagcccatcgatgctaggaagaaactgtgtcaactaatgagcaaaaaccagctaacatcataatgacaggattaaattcacacataacaatattaaccttaaatgtaaatgggctaaatgctccaattaaaagacacagactggcaaattggataaagagtcaagacccatcagtgtgctgtattcaggaaacccatctcacgtgcagagacacgcataggcttaaaataaagggatggaggaagatcaaccaagcaaatggaaaacaaaaaaaggcagaggttgcaatcctagtctctgataaaacagactttaagccaataaagatcaaaagagacaaagaaagccattacataatggtaaagggatcaattcaataagaagagctaactatcctaaatatatatgcacccaatacaggagcacccagatcataaagcaagtccttagagacctacaaagagacttagactcccacacaataataatgggagactttaacaccccactgtcaatattcgacagatccaccagacagaaagttaacaaggatatccaggaattgaactcagctctgcacgaagcagacctaatagacatctacagaactctccaccccaaatcaacagaatatacattcttttcagcaccacaccacacctgttccaaaattgaccacataggtggaagtaaagcactcctcaacaaatgtaaaagaacagaaattataacaaactgtctctcagaccacagtgcaatcaaactagaactctggattaagaaacttactcaaaaccgctcaactgcatggaaactgaacaacctgctcctgaatgactactgggtacgtaatgaaatgaaggcagaaataaagatgttctttgaaaccaacgagaacaaagacacaacacgccagaatctctgggacacctttaaagcagtgtgtagagggaaaattatagcactaaatgcccacaagagaaagcaggaaagatctaaaattgacaccctaacatcacaattaaaagaactagagaagcaagaacaaacacattcaaaagctagcagaaggcaagaaataactaagatcagagcagaactgaaggagatagagacacaaaaaaacccttcaaaaaatcaacgaatccaggagctggttttttgaaaagatcaacaaaattgatagaccactagcaagactaataaagaggaaaggagggaagaatccaatagacacaataaaaaatgataaaggggatatcaccaccgatcccacagaaattcaaactaccatcagagaatactataaccacctctatgcaaataaactagaaaatctagaagaaatggataaattcctccatacatacaccctcccaagactaaaccaagaagaagttgaatgtctgaatagaccaataacaggctctgaaattgaggcaataatcaatagcttaccagccaaaaaaagtccaggaccagacggagtcacagccaaattctaccagaggtacaaggaggagctgataccattccttctgaaactattccaatcaatagaaaaagagagaatcctccctaactcattttacgaggtcagcatcatcctggtaccaaagcctggcagagacacaaccaaaaaagaaaattttaaaccaatatccctgatgaacatcaatgcaaaaatcctcaataaaatactggcaaactgaatccagcagcacatcaaaaagcttatccaccgtgatcaagtgggcttcatccctgggatgcaaggctggttcaatatacgcaagtcaataaatgtaatccagcatataaacagaaccaaagacaaaaaccacatgactgtctcaatagatgcagaaaaggcctttgacaaaattcagcagcccttcctgctaaaaactctcaataaattaggtattgatgggacgtacctcaaaataatgagagctatttatgacaaacccacagccaatatcatactgaatggacaaaaactagaagcattccctttgaaaactggcacaagacagggacgccctctctcaccactcctattcaacatagtgttggaatttctggccagggcaatcagacaggagaaagaaataaagggtattcaattaggaaaagaggaagtcaaattgtccctgtttgcagatgacatgattgtatatctagaaaaccccattgtctcagcccaaaatctccttaagctgataaacaacttcagcaaagtctcaggatacaaaatcaatgtgcaaaaatcacaagcattcttatactccaataacagacaaacagagagccaaatcatgagtgaattctctttcataattgcttcaaagagaataaaatacctaggaatccaacttacaagggatgtgaaggacctcttcaaggagaactacaaaccactgctcaatgaaataaaagaggatacaaagaaatggaagaacattccatgctcatgggtaggaagaatcaatatcgtgaaaatggccatactgcccaaggtaatttatagattcaatgccatccccatcaagctaccaatgactttcttcacagaattggaaaaaaactactttaaagttcatgtggaaacaaaaaagagcctgcatttccaagatattcctaagccaaaagaagaaagctggaggcatcatgctacctgacttcaaactatactacaaggctacagtaaccaaaacagcatggtactgataccaaaacagagatatagaccaatagaacagaacagagccctcagaaataataccacacatctacaactatctgatctttgacaaacctgagaaaaacaagcaatggggaaaggattccctatttaataaatggtgctgggaaaactggctagccatatgtagaaagctgaaactggatcccttccttacaccttatacaaaaattaattcaagatggtttgaagacttaaatgttagacctaaaaccataaaaaccctagaagaaaacctaggcaataccattcaggacataggcatgggcgaagacttcatgcctaaaacaccaaaagcaatggcaacgaaagccaaaattgacaaatgcaatctaaataaactaaagagcttctgcacagcaaaagaaactaccatcagaatgaacaggcaacctacagaatgggagaaaatttttgcaatctactcatctgacaaagggctaatatctagaatctacaaagaactcaaacaaatttacaagaaaaaaacaaccccatcaacaagtgggcaaaggatatgaacagatacttttcaaaagaagacatttatgcagccaaaaaacacatgaaaaaatgctcatcatcactggccatcagagaaatgcaaatcaaaaccacaatgagataccatctcacaccagttagaatggtgatcattaaaaagtcaggaaacaacaggtgctggggaggatgtggagaaataggaacacttttacactgttggtgggactgtaaactagttcaaccattgtggaagacattttggcgattcctcagggatctagaactagaaataccatttgacccagccatcccattactgggtatatacccaaaggattataaatcatgctgctataaagacacatgtacatgtatgtttattgtggcactattcacaatagcaaagacttggaaccaacccaaatatccaacagtgatagactggattaagaaaatgtggcacatatacaccgtggaatactatgcagccatagaaaatgatgagttcatgtcctttgtagggacatggatgaagctggaaaccatcattctgagcaaactatcgcaaggacaaaaaaccaaacaccgcatgttctcattcataggtgggaattgaacaatgagaacacttggacgcagggcggggaacatcacacactggggcctgttgtggggtggggggaggggggagagatagcattaggagaaatacctaatgtaaatgatgagttaacaggtgcagcacaccaacatgtcacatgtatacatatgtaacaaacctgcacgttgtgcacatgtaccctagaacttaaagtataataaaaaatatatctatatatatatataaagaaaatattgaaacgtttgcataacattaaaaaaaaaagaaaaaaacaaaacaaaaaaatctctcctggaagacgagtcacaacactacaccctcttggttatatggtgaaaagtgaagaaaggagaggagatggtacatacagggggaataagtaaagaagttgccagcgtctttgttttttgagaagagatgacgtagcacatctattgtttttcatcaaattctgaagtgataagatgtaaagtagtttagacaatgttactcacccatccattcattctttcatccaaccatccatccatccctccactgacatgttcattttgtgtatttatacatgtacttagtgcttactctgtgtcaagcatgatggtatactttggactttcaaaatggaaaggtgtgatctaaagaaatatgaacaaagttttgtgggtactcaaaaagaacaagcaactttgcctggggtaaggtggaagtttggagtggttgagctcccaaagatgatgactgggctcagtttttccctggtgaacaggatattagcagataatcaaagggagaaggacatctcagacacagagaaaaacatgctctcatctctggtggctctcatctctgggggggacgagctgaccaagactggttggggtagggcctgggagaaatgaaacctctccagaccccaaggactgaattctctgaagaagatgcctgtagtccaaggtaaaggtatggtgaattctgttacccatcatgattgtgggaagatcataatcagaattccagggagaaggtaggaatccaagagtggttggtctgactcactgcgagtgagacttgatacagtttcaaggaaaggggttggcagcaagaatatataagagttagttatgtattattaggctacactcttaatatggagaggcagtgttattataaagccttatttactacattgcaaagaactatgttgcatgtttctcccagctggctctgcagcacctccctcaggacaccgtctcacattttcctagattgggtgacgactttttttctgaggtttctcagctccctgtaatagcactgtcaggatccttcctttactatgtggttcttccctagtcctatgctgctaatacactgtggtctcttaaaagcaggggctagattttctgtctctgaatcctcagaatccaggacagagcgtggcacgtagtgagtcggtaccactccgtattgaaatttatgtagagagcttttgtagaataacaatacttgagtctcatcaccagagacttagaatttgtcttgggtggaacctgggcatgaatatatttatatatatggaaaatcccccgcttgttttaaaaatgcagctatggttatagaccactgaagcagatgcttagataatgcttcttgaggtattggactataacagatattatcctggccatctcattttttggtagggcagggggttggagaggagctgcaacctgctgtttaggcagcttctcaaggatctcagttcacttcaggctgcagaaacctgggagcagatgactgcttctagatgctgcatacttatctgaaagaaaaccttaatgtgctcccaggaatacgtgcacagatttgcttcaagatgacttggttataataaccagctaagctaggctgtcactggtgagaacggaaagtgactgagcattcatagaaatggctttcctgctcaccagcttgttggggaaggatcagggctatggattaaaggtgggggcactgagtgtgttacagaaactggaaaatgaggtgcccatctttctaccatccagaaaagccaccagaaactatagatcggaattcggaataaatcaaggaaaataaatgagttctccctcgcccaaatttactgtagttgtataggtggatctgggagatttagtggaggaaaagggagcacacagcctaagctttccagaaagagctggggatgatggtgttagaaatgtgatagaactttaaaaatgttgaaatcattggtgacaattagaaaacattaaaaacacacacacacacacacatggtttttcaacattaaaaccgaggcacacactctgttggcgggggtgggtgttgacagagagagtgagtgagtccatatttcccaagatgaggagaaatgcccttgtcctaggaggcagtgattttgccagcaccatggagaagggcacacattgtctcttgcttattttttatttatacagataggtttctggggagggtttttactgtatccaatctgaactgacaaaggcaatcctgatgtctgtgtaactgcatgcgtagatcagaggatacaaattcactccttagatctactggtcttttctggccaattctgttgcattttagatcgacatactccctctgtcatttcttagcaaaggaaaagaggttcaagggtgagattttaaaacctccctttgctagtagtttttctaaagtttctggtagaattaatccctaagcagagcggtcagtgagagtgggctctgaattctggctgaggcataggctgctgtatgtttcatgagatcggcctcccagcttggttttgggcctgcctgacttggaagggatttgtgggagaagtccattttgaaaaatgaggatagtagacctttgatttggggaaaccctgctgaggaaactatattagtcatcactgaatgagcttctgatgtctatgttctctctctggagggtggtgggatgattaagggtattttcactgtaggaaggaggatagaacgttgtatgtattttttggtttctcccatttcctgtcaaataaccccttagtcttttgtatgtggtcaagctgtgttgtcaggacagttgaagaaatctgtgcccagaagcgtccagatcctctattctagctccacgcctcatctgagaatctctcctttctctctgcaacagttacgtgacatctcctattcgaacttaaatccgcttaataaaatcatggcgattacttattttgtgacaggtacttgtgctaggtgttgagcccaaagtagtggcacagacctaatccctgtcctcaagtaacttaccaatgattcacaatctatttgtttaacagtgtaagagggggcagctccgagtggattactttatgactccctacctcagagaagattatagtccagaattttaatgctctcattcagggctgatgatgatgcagaggcataaataaaaggaaacactagtttgcgattggatgggggagaaaagggaggaaagtcatgtgaggagggagggagcttgttgtgaagctgggaaatggaagggtggaaaccatatctaggatggctttctggaaaaatagttgcaaagattttcatcaccacggagtcctgttcttattcctatgcccatggatgcatgttttgaaatacattgtctctcaaaaaagcggcatgcattaaacattcagtaattttctgaccaacagagttaaacaggttgcctatttagagtttatcttgtcctcattcaaacaaggaatcttggcgttttcattagcccatgcagtaatactgaagatgaatgagtgtacaatttctgttaagctttttgaaatattgcaaatagctcatgtacccccatttctgcaatgaaaaccttacctgagacgattgctgcagggccatttgttcatgtagttcaattttcacttaagctttgaaagtttacacgttaggaccgtgtaggtacagaacccagggcctatgactttattggctcaggatatttgttaattgacattaaagtattaagtatcaaaattgaaataattgcttaagtatttagaaaatgaacagtatattagctagtcaactacaactcaacagttttgcagttgtatttacgttgtatttatttggggaggttttttctttttaatatctttgacacatgatatgaaatggggccttcaaaagtcaccttgtttagagcctgcttttttgtctaaagagctccaagaaaggagattgagtggtataatttaagatctaaaagcagatgaccctgttcttcctggaaagtagactggagatgcaggtcccttgggcaagacatatctgctatctcctattctattgtgtggataagccatcatttatataataggatccctgatgtggggatatttatcttgcttgttacatttgggtattatacgtaatacaatattgctataaatagctgcacacagtgcaagaaccttgcaaccaaaaagacatgggagcagatccagctccattgcctacagttctgtggctctggacaagttgcataaagctttagatttcctcatttgtaacatgggaagaaccagcgtagcagatctataaggttattctgtgaattaaatgaggtggctcatgtaaagcacttatcataatggctggcatatattaagtgctcaataaatattgaatgataataatcattagaatgaatcttattttgtatcttaaaatggggtaatacttatccccggggttcttgtcaagactcattgagatattgaacacaaagcacacagcccattgcccagcacatagtaagaattcaacaaatttagttttgttttttatctatttttttgcacctcataaatttttcctgttttgaagaacaaaatactaaagtggagcctatctgaggcacatcttcataagtgtctccaaccagcctttattcattggcattaagatattgaacatgcagactttaggaggcttaattttttctgctctggcctgcaggttggaggtttcactacattttaataaaaacccttgcaaagcaacttacagatctaaataaaaacaatgttttgcttatttagctggtttcatagttgtgccttttaaaagaatgttagcccatgttactttgcagtgcttttctgtccatttagtaatgttggcaacagtgatccagcttgcgagccccaaggttacatctatagccccagcatgggacgggagacctgctgggtgtggggaagaaggagagccattcccacagtagcctgacacccctgaacacagggcttcctgggtgtacatccctgggatgtatccactcagtcccctgtggacatgattctttaggattgcagcctgactttcatttctttccaatggagaaagagttctattttcattgttacatatgtgattatgaacatttccaacaaaacatagcaaataaaattatccctttaacctcacatctgtccctcctccctcccactcagtgatatcattgttaatggtttgccatgcattttttccagactttctggacatagaaaataaattttcaaaaaaaaaggtgtatattacatatggtactctgtagtctctttttttctgaacatatttaggatatttttccaggtcaagatctatctaccttctcctccattgtgtgaataaactgtcatgtacataataggattcctgatttgaccacatttatcttgcttgctgcgtttaggtattataaacaatgcaatatgctacaagcagctgtgcacacaactgtttgtcttatgatgttctttggacagatttacagaatgatttaccatctgcaaagtgctgccacatccattcatttatgtgatccaaagaggtggaggcagaggcagtcacaagcctggacttgagtcaggcaggcctgggctggaacttggattagcagaccacagccaagcacttcactcatctctaaatctggaattgtagaagtctttctcccattttatatgtgcttgcaggattccttaagttaatgtctgtaaaatacttagaaaagtacatgccacatattaaaaactcaaaagatattagctctcagtgttggaattagctatggttcctcaaaacaattctgatattgtggatgccaatgcatccaaaatacagatgaagaaacttgaggctcagaggggcaagatgtgtcaaggtcaatgaccaacaaggaaagagaatagttaatggcaacttcattagtctctgtgcaaggagagacttttgcagagagtttttcataatattgaaagaagttgccagagaagttggagagggcctaaagcaccattccgttgtgccatcgacaccacacttctgatcatggaaggagcatgcaattaggcagaaatgagcttaggttcaggttgggccatctgtgaatggaacattcttgggcaagttactaaatctctctaattcgtgtgttgtgtatctgggatttcagtggagttttataaacagttaaatgagattatgtcaagtctatatgcacagttgctggcatataataagaccttgaaacttgtgttaacagcagtgtcagaattagaacccacatcttcttttcctttttattgcatccttctgccaccaactccaacccttgtcttctagtgaaggctaatacaaagtgcaagacatgtgtgacaacatgaaagcattgcccaagtcccgcctggcacatggggtggggacactcacccagtgggtggggagaagcagagatgatgggatagagcagtgccacccaccctgccttgtttaccctgcctccccttcgctgagctgtctctgtccctggctgcctctgaagcttgcttcacgcaatgagatgtcaatgcagtaaaatctttcaggatggaaaccagttcaaacaggaagaaagaagacagcactaaacctagaactcatgcaaaaatcacattccctctaagggccagagagagagagggtgactgtactgtagatgatatctgttactatttttcaaagttagatattttctttctaggtgtttgtggtagtttcaagataagaaagaaatggaaaagacctcttccatagaacacagaatggacaaaacagtagcagccatagattgctgctgttttcactgtaagaatatacattctttctcttttgcttaaaaaaaaaatgtaggcctttggatttcactctgtagctgtgaccttgtgatcttcatcttagcactgaaaaggcctaaagacaaagcaggcagaggaggtgagattgtccttggcataaacacagggccaaggctgcctgtgtgctggactggaggaagcagtggccccctcaatgttcagcagaataggtccttcattctagctctgatgacatttcctgtcacacaacactggtcatattaccttgtgcaaaccccatcctaaagctgaagtttttctttctgtaaaatggattgcactgtcactatttttgaaaccttagacatttacatgacacaatcatatttttaaaagtgtatcactatcaggtatatgtttaatatatttaacaaaatcacctcacttctaaatattcaaacatgaaaagtttagggcagaattccctgtaaagatggtaaattaaaataggtacatatttttcctccctcttgaaaacctcctgaaaaaatagaatttctttgaaagaaaggtaggaatcatacggaaagttagtacatgacatagcagacctgagaaaagtatttcataagccagcagtggaggaccctgaggactcatccaatctaaaacaaagtttccggaaatggtagtaccaggtgcccctgcaagtcagggtgaaggaaaggaaggagctcaaataaggaggatcagctgagagcctgttccagaagcagtctgactccatggggctgagttattgaaggtgtattcaataaagaagaaaaaaacagaagacatctggcctaggagatgccagacgaaagtgtgggcagtgataccttactcaaaagcaggtttcaatcaaagtgtgcatcctggaggctaaaacctccagcactttcctcccgttcatctcctagcgcactggtggccaggccttcacacatcatgcagggatcagacaattcttatttgtgaaatcctagcagtccaagaagaaagacttgcatatattgatattggcatctctccaactaaatgtcccaaccagattaccctgcagtaagctcacaggccacaagccctactcacatgctcagtcagtgctctccagctaaatgtcccaaccaggtcaccctgcagtaagctcacagaccacaagccctactcacatgctcagtcagtgctctccagctaaatgtcccaaccagatcaccctgcaataagctcacagaccacaagtcctactcacatgctcagtcagtgctctccagctaaatgtcccaaccaggtcaccctgcagtaagctcacagaccacaagccctactcacatgctcagtcagtgctctccagctaaatgtcccaaccaggtcaccctgcagtaagctcacagaccacaagtcctactcacatgctcagtcagtgctctccagctaaatgtcccaaccagatcaccctgtagtaagctcacagaccacaagtcctactcacatgctcagtcagtgctctccagctaaatgtcccaaccaggtcaccctgcagtaagctcacagaccacaagccctactcacatgctcagtcagtgctctccagctaaatgtcccaaccagatcaccctgtagtaagctcacagaccacaagtcctactcacatgctcagtcagtgctctccagctaaatgtcccaaccaggtcaccctgcagtaagctcacagaccacaagccctattcacatgctcagtcagtgctctccagctaaatgtcccaaccagatcaccctgtagtaagctcacagaccacaagtcctactcacatgttcagtcagtgctctccagctaaatgtcccaaccagatcaccctgcaataagctcacagaccacaagccctactcacatgctcagtcggtgatcaccttagcatcacacacaatgaaatgagaacatagccccaaggattaaagagaactaaggaacaatgctcacatagaagagagagtgaaaacaagcaaacagaagcaaatctacttggaggacacagactctgtgaggcaaagcaaactttagaaaagaggcagagagaacttagaaaaatagcagaagagaccattgtaaattgggagatagtacttaaaaaaactaaacattcagagaatgaaaaggaatcttggatttttccaaattgctttttttttggtgggggggtggcaggaaatgaggagtgtgcaagaaatgggaatccatcatagtttacaacttggatgagaatggcatttgcatattcaaaatattttaagtaataaatattgatcaaagcaaaattataccgtaagtgtatgggagggaggagaaatgggaaggatgcatgtgcctcatgggacagtgggaggaaagagtgaaatgcctggtttttttttttttttttttgagactgctctgttgcctaggctggagtgcaatagtgcaatctcgactcactgcaacctctgcctcctgggatctacctattctcctgcctcagccttccaagtagctgggactacaggcatgcgccatcatgcctggctaatttttatatttttagtagagacggggtttcaccatgttggccaggctggtctcgaactcctgagctcagatgatctgcccgcctcagcctcccaaagtgctgggattacaggcatgagtcagcgggcctggccaaaatgcttgttttctatggtggacagttaatagacaatgccaaaagtgaaaagaaatgtttaaaaaagaagtaccaaagcatattattggcatcatgttcataaatgccaaaataacaattacaacagcttaaagaggtacaaaagttcctctggcaaggggatcatgagagactgctgtatttcgtttgtttgggggtttggatttttttttttcttttttgagacagggtctcactccctgttgcccaggctggagtgcagtggtataatcacagctcactgcaacctcaactttctgggctcaagcctgcctcagcctccccgatagctgggactacaagtgtgcaccaccatgccaggctaatttttgatatttttagtagagatgggatttcgccctgttgcccaggctgatcttgaactcatgggctcatgcaatcttcccgcctgggtctcccaaagtgctggggttataggcatgagccactgtgcccagcttgttttgtttttaaatgaagcttgaagaattttttgaactatatacacttataactttgataaaaataaaatttcatatcaaaactgtaagtagcatcatttgtgtaaaagtagatttctcaaattattaaaaatattatcctatgcaattagacactgagcacatcaaagttttatttaactggtaaaccagggaacaagctgaacaacaacaacctggttcaaaagtattcaggcttcttgatattttgtgagagaagagatacttgtataaaattatcattaggtataaaacaggtaaattttctccagagtaataaaactatgagttttaacaaagcagcaaacatcacattttatcatttttctgcaagttaactactaactctgcaaggttataacatttctagtttctaatcagttgtggatggttaatccaaacaaagttatattcctgagagggtaaaaggaccttccgtgtggtttttccaaatgttctattaaaaatgtcatgccatcctcattttgctttatttccaagttttggagctttttcttgcacacttgccataaatatgaccaacttcaaaaaataaacacaataaaaacaaaacaatgtcattaagttctaagtagatactgtttgctgcctgctctgacctgaagattttcctctttgttagaaaaggtgtttttacaagaactagagaggtattaaagacatataatcaccaaaacgagatttctctacttggtatcatgaaaagtgttgaaagaaaaatgaaaaaaaaaggccacattttttatataatttggtttagtgttatgaaatgctttgtctattgttacttaaaatattctcatatttggtgtgctttcttattctagaaaccctacaggagatcagtagttttgcactgcattctgaaaagtcctaggagtggcctagggtcaagagtgagtcaggaagagagggcttggctcccttagccccgaccctgcctagtccccatccactcccagctcaccttctgctgtgttatgtagtgagctctgcataagacttcatttgaagtcccttccagataccagagcctataattattaaaagaaaaaaaaatcactacaatttgcagtgtgtttaggttggatggattaatttctttgccaaggccataatgggaagactgattttgtcatttcaattacaagctaccgtttagtttgagcccagaagtcactttcctagagtctccctccacttgcctggcactggagcaattaacagtgggtgatttgtggctgcacttttactgcttagcacaggtttatcatcttgaaagttttccatttgcatatatgctatacattctttgggtgacatttagatatcacccagagtttagattatgcattgccttgtactgcactttctgctacgtgctggcaatctgcaagcccaaccagagagctgatgcaaaccaaggggaacgtgagttgcagccaccacttactgagggcttactatataccaacccccagtatcaaagactttacctgcattaccttgtttattcctcaaaccagtaactttgaggttactattatttgccacattttataaacaaagaaacagaaactcagagaggaaaagcaatttgcccaaggtcacccagctcaaatgagcagaattgggattcaaactcaagtatctctaatctcaaaacactctgctatgcaacctcccaatactgggagctttcagagtgaaatgaattgaatttgacagttttctacttttaaataccaaacttcctgagcagtctaattgctgctctttggaacaagaagaaatggctatttaaaagaagcaaggggcaggaggtcaagaaagtgggttttaatatctctattcacaagggaagagatgtaatcctggaaaaaaaatagcatcaaaatgaaaaccattatataaatttgatgaaattgcaaaggaatgcagaaaatataagggagggggaatacatagcattgaagattttataaaaggcagagaaaagatcaaaagtcactgaaggaggtagaagttggtccaattgaaggcagggtctatccatcttgacagatggaaggtggatgatgaaaccccccaagcagccaccagaaatctctgatcgtgttccagtctgcatgggtgagtttggataaggagaatactctggagacaggctgctgggttgaatcctttctcccttcctcactgggtgaccctggatgaattacttaaccactctggcttcagtttcttcatctgaacaatggagagagtaatgttgctcgtcttgatgtgagacgatataaagtgcttagcagagtaccgggcatttaggaagcactaaagactgtcagctgtggttgttgctataaccatgaacatcatgttcacgtagtacaagaaataggagactgtaagtcagcaaaatggcttggagaaataaaggagaaggaaatcaggagagaggttcatctttgggccagaaatatggggagatctgtcttccctggccttgagtgtcaggagtagaaagggctggttggtggggagagaccagcaagtctccagcagagactgaagtctggctgcgcttgatgaagcaggggaacttgtttctgtaaaataaatgctctaacaaaagctccagtggcagaggttctgttggtggctccacagggctagagagtctgggagtagccaaagtaacaaataagtgagtctaaggcagagaaagaaagctctgggttattcatctccggatgccaaaagccactgaaagtcattggggcagggggaggacattttttagtaagcacatcttctttctttttctggccctaccccaactgcaaatctacttctctctcactgtataaccaactccctgcaattccttacattaagtgacaaaaccacacttaagtttaatgcggtaaagcttgctggagtacttgtaaatgagcatgggtggtcatccacgttttcagccactatcgatttagcactttctttgtgtcaggctctggctaggttctggagacacaaggctgttcccaaacccccatctccagagctaaacagcatgtcacatcatggttcttagccatcagaataacacacctaaaattcagaaattgctgacgctcaggctctgtctcagactacagaatctccagcagaggacccaggcatgtaagttcttccagaattgcacatgtcatttttaggtccacatcgaccttgagagaaccttctacatttttgtagatgagagaattgaggctcagagaagtgataagtgaggttgcacacctggcaaatacagcattgaacttcagacccagagcttctgaagttaagattcctaggcctttccacttggccatggccaccctcgcgtatgcatggtgtgcaactctgtgcctaaatgctatgctggtaaaatgctccaagatatagatgaatatgcttgaaacccttgccgactacaacaaaagctcaaaaaggatcggcaaatcctacagaaagtttagggacctgtatttaaagtagccagaacccaatacctgttacaacctgactcactgtaaatttccacccaaggtgggtaatgtggcttctattatacaagcaccatgtggttaccattatgtaaccctagtttccattatataaccctagtcccggggctccagaaacactgcctcctcaatttgtccctccagcctccaagtgacagtggcttcctgctgtggctgactctaggttaccttgtttggtgtgttggcatttccgttacctgtataaccaattccctgcattaaatttcctccttattccagctcagatcctgactattagatgaagaaaccaaggattagaaaagttaatataactgtattggtctgttcttgcgctgctataaagaaatacctgagactgggtaatttttaaagaaaaaaggtttaattggttcctgattccacaggctgtacaggaagtgtgatgctggcatctgctaggcttctggggaggcctcgggacacttttactcacggtagaaggcaaggcacgagcaggcgtcttcacgtagccagagctggaggaagagaaagaggggagaagttgccacacacttttaaacaaacagatctcatgagaactcactatcgtgatgacagcaccaagggagatggtgttaaaccatgagaatccactcccatgatccaattgccttctacgaggccccacctccaacactggggattatgatttgacctgagatttcgccggggacacagatccaaaccatataataacttaaccaatgcagtactaattattgtcagagctagtattctagctccaaagttcctgattccaaagcctaagttaagccatcttaacttatatttcaggtgactagtggaattttttatgcccagtgtaggtggtaatgacgatggagatatggcgatgatgatgatgatgatgatgatgatgatgatgatgatggcagtagtggtggtggtgttggtgatggtgttgaagatcaccatgtctgaccactgttgtctgtgtcctttgtacaattgttcagatgcagtgtcctggttgtcacatagatgtctctgactgttttacaggccttcacctaccaccatatccaggagatcatggtccagctgctgcggacagtgaaccggacagtcatcaccatgggccgggatcacattctgattgtgagtggattatttcttcttgtcaaatgttgcaagctcttcagcatctaaaaatggattttctgaaaaggcagatcacattgaactcccagcattgatcattgctttgttttggagtagggtgaccagatttttcctgtctgagttgggaggacttgagaattaactcaagttgttgaaataaaacagggcttaggacttgtctagttgagtgtaccagcgctaaattgagcataccagcaagggtggactatcactgctgaagacagagaagggagagcagcttttgtaagtaaacaaggtggaacattccagatgcatgtccactaggaaccttttcctctggcctacagtcacatggtgcccagtctcagggtcctgtgagcttggtttcctaaggggcttcattgcgtgttaattctgcccatagatgctggttattcaaggtcattactacatattgagctattcttctgcataaacagtatgttctgaagatcaggaaatttctgccccgtcatctgattatttttcttctcccgacacagaacccagctcgaaccctttaacctctgcccatcgtgctttaaaccaaggacccaaaattcaaatgctttcaggggccagtcaccaacataaatgagtatgcccaaccatgtcactcctctgctgaaacctgccaatggttgtccatctcactcagaataaaatccaaacattgccaggcctgaaatgcctttgccccatgcttatttatttatgtgttcctcccacatataaaacatgatagatgtgctgtttccctttttttgagtctgatatcacctaagcatagaggcttgccttctctgatcaccctgtctacaattcccagtacctctccatccactaaaagtcataccttacttctttatttttctaattacgtataatcggaaatatacattatcttatttggttattgtctagctatcctcatgagaatatgagctccaggaaagtaagcatgtttttctgttttgtcattgctgtgtctctaggtcgtataacagcacttggcatatagcaggtgctcagtaaatacgtttgaatgaataaatgcatgacatgtgccaggcagggactctaatgtttaaaaaaggatgagggctactcagccttgactgattgataccatgtgggattggaccatatagttgctaggattcccaatatttcaagagaaactgaaaatttccatgttttgtatgaaattttctgatatttcagtgttggcagtttattttaaaaaataatgtttataaacactttgtgactcccaaacagctggattcccttcagaaagccaccctgacattcctgctttacacagtggtgacatccgtggagagcatcagtggtgccagatactcttgcttttttgggccagagagccatgtaaactggtctttgtcatttgtcttacttaccatccttccacctttgaagtatcacatttttcttttttgttttgttttgtttgagagacagagtctcactctgtcgcccaggctggagtacagtggtgtgatctcggctcactgcaacctccacctcctgggttcaagtgattgtctggcctcagcttcccaagtagctgggactaccagcgtgtgccaccatgcccagctaatttttgtatttttagtagaggcagggttttactacatgttgaccaggctggtcttgaactcctgacctcaagtgaagcattttataacctcctttatctttattccttctctttagagtaaacctaaagatgatcatcagtccatttggctcattctgtacgtagcaggcttttaactccctttcctgtagaacagtgattcttttaaatggggcctgtgtcataagaagcactaaataagtgctgtatattattattttgctttctatctggtagagtgaggctctctgtcttttgcattatcaacataggcaagtaactactcagtactgccagtcctatgagccttttgtttgatggcttttgtggctggctcttctaacacacatccctcactgttgccccatcaatctttaccaggacactcccctactctggaatggtcagtagctccctgctgcctaccaaatgaagtcataaatgcattagcccaatcattttcagcttctgtgatctgatctggtcacaaccacatttttcagtcttttcatcaacttttttccatccaaatatccagccaaaatggatgtctggatattgcccaaacatgctggcactgtcttacatgcaggcttagcctctgcctctttctttgcctgaaattccttcttgtacctttcaacatgttgaaatcctacctagttttccaggtccagcacaaatgtacgaagctgctctagctgtgaccgctccctcttctaaatcaccaagctctctttaccttttttttaaaagcagtttttcctggctaacacggtgaaaccccgtctctactaaaatacaaaaaattagccaggtgtggtggcaggtgcctgtagtcccagctactcgggaggctgaggcaggagaatggcatgaacccgggaggcagaggttgcagtgaaccaagatcgcgccactgcactccagcctgggtgatagagtgagactccgtctcaaaataaacaaataaacaaataaataaaaacagttttattgaagtatagtttatacactttaaaatttaaccattgaaagtgttcagtttgacgagttttagaaaatttatagttatgcaaccatcaccgtaattcagtttagagtatttcttttactctccaaagttccatttgcagtcactttctttccctcctctcaccaaccctaagcaaccattaatctacttttcatctccatagattaccttttctggaaaattttatataaatgaaatcatacaattcgaggtcatttgtgtctgtcttctttccttagcataatgtttttgaggtttgtccatattttaggatatatcagtacttcatttcttttcattgctgaataatagtgcattatatgagcatgccaacttttgtttatccagtcactagtggatggatatttggattgtttttaacatttgactattataaataatactgctttgaacattcacaaacaagtgttgtatgaatgtgttttgacttctcttgggtagaaatctaggagtggaattgctggggcatatgggaactgtatgtttaactttagaagaaactgccaaactattttccatagtagccataatgagaaaaacctggaattatatatttttaaaagcattccctgaaactaggagggagcaaagagattaaacaatgacttggatgagtccagcttgaccagtagatgagtttattatgacttacatacgaagtactcctggatgctggcaggacagctttagagatcagcacaacctcccatccctaagctgcttttaagctaattttctggtgctttgcctactgtgtgtgcgtgatggggctgttttccttggtagattctcagctaccctctgggatgttcaggttatcagggacacctgcttctaagctgggcaccttggccttggctcaccgcccagcctttaaagacaagcagcggacatgcactcctaagtaacccggtgggtgacccatcacactacgtggctgtaccacttcacattcccaccagcaatgtttgaggttttgtttacccacatccccaccaagtcttattattgtcagccctttggattataactgtcctagtggtatttcactgtggttttaattttcctttccccaatgatgaatgatattgatcacattttcatgtgctctgcctcttttttttttttttgagtcatttttatctatgaacttgtcacagctcctctcttagactgtaagagtttaaggcttgtgcctatttgtgaaataaatggagtaataatagatcttcctcatagagatcctgtgtgaattaaatcgtataatacaggataagcatttgtacatgtgcttcttatgcactgtattcatttatttattcctttagcagtttatgagaacctcttagatactcagcacaaagactcagaaatgagttaggcatggtctgtgccctggagaaaatcagacctcttctgatgtgatgtctctcaggaatctcaaatgcactgcaccccaaactcaactcattgccaggtccctgaagcccactccacactccacctgaattcgggatctcagtttatgggactgccatcctagatctcaagctgcccttgcccctccctctctgtcagctgcctgccacttccattcacccaccaagtcctgctgcttttggcccacctgtccccactccctccccacttgggctggacaagctaccctgcctctgtcccttgccctgtgttctccgaggccctgtgcatacttaggtcactgtgcccattgtgcttatgacattgtaaggcaattctctatttgtaggctctccccacatttagtggaccccccgaggtcgggcaccctgttttactcttttatcctcaacacccagcagggtgcctggcgtgcagtgggtacccaagtttgttgagcaaatgaaggcactaatgaaatgaagtgagtgaataagtgaaataatccctgaaaatgctgtcatttcttaccttcatattcttgaatgtgctttcccctcagattgctcttccttattcaacaaatgtgttttctaaatgtgggaatccacatttcagggagtaaggaattgcctgttcagactttctggctcatccctgaagccttgcaaaggttgtaagttgcaagctgtgtcattagtctcaatgactttggagtttgctagtgtaattacaatgctaagagtgctgagaggggagagccagaggcctgcggcaagcatacttcactaggagcagaaatgtacctgaaatagaaggaagcaacaaacagggttttcttaagatatagtttcattttcataaaatgagcctttccagcaattcctagaatagaaatatctcctccaaattaaagaaaatgatgttggaaagtagttactcaggggtcaagggtccctgtcttagcactgaaggccccaatctaattttgaattgaaatttgacaaggaggagagatccccattccacctgtcacttttaattttccagatgtgatttttttggttagtttccattgcttgggaatattaatcaatatttgtggtaaacaccataaatgtcaagtacttttgaaatcccaggagggccccaagtgggtataggatggctggttgcaactctcattcttatacgggattagtgacagtttttttcttcttttcagggataggaacattgcagtaaaaggttttagccactaaaatcacaggaaccatggggctaggatggatttcttgttgggcttagggctttgcgatgaccattcctgatttttctatagatcaattccctgagcaatgaattgttggtgacaaatgagcaaaagggaattttgcaaaaataaaaagcaaatgacttttacatgactagtaccctttcatcctctctttgccacagtctaatttgtcaggtaacttcttgtttacttaagtcctaaggaatttagcttttgtgctgagaaagggagcatggtttgatagaaagtgtatatatatatatacacacacatatacacacacacacatatatacacacatatatgtacatatatacacacacatatatatatatacacacacacatatatatacatacagatatatgcttttatttcaatacgtttggagtacaagtggttttttgttacatagatgaattatatagtggtgaattctgagattttagtgcacccatcacatgagtagtgtgcattgtacctaatatgttgtttttttattcctagccccccttccaccctcccccttctgagtctccaaggtccattacgttactctgtatgcctttgcatactcatggcttagctcccacttataagtaagaacatgctgtttttggttttccactcctgtgttacttcacttagaataatggcctccagctccatccaagttgtggcaaaagacattatttcattccttttaatggctgagtagtgttccatggtgcatatatcccacattatctactcattagctgatgggcacttaggttggttccacatgttggcaattgcgatttgtgctgctataaacacacatgtgcgagtgtctttttcacataatgacttctttccctttgggtagatacccagtattgagattgctagattgaatggtagatctacttttggctctgtaaggaattcctatactgtttgccacagagattgtactaatttgcattcccaccagcagtgtataaatgttctcttttcccaacattcatgccaacatcgattgttttttaactttttaataatggccattcttgcaggagtaaggtggtatcttattgtggttttaatttgcattttcctgatgattagtgatgttgagaatttagatagaatattctcccttatctgggagaacaggaaaaaaattctacattctttctgcagataattggctagtgactttatgccaatttaatctctctagaccttgtttttttaatgcaataaactataccatatttgaaatcttcttcttatatctgagtttcctgacttggctgacaattcctattctctttttctatctcccaagctcctgaatcagagacctaaaatagattttgctcaagtgccagccctggctgattggggatggctgcctgtagaactgtgttgaggaggatgcagaagctacacattggctcagtgggaagaacttgggaattgattagtgctgtctgtcatggcatgagattggagaacagtgatgtatgcaagatacttgcaaatattatgtatttactgcaaccgttggtgtttttctggcccagtccaaaaactcttgtataaacaagattctcttgcacatattcttgcttcctttaaaaaagctgtggtataaaagcagaagagtaatggaaaaaaccgtcttggagagcctgcctttcctggggaacaatttcctcaggctacatgccgtattttatcaaatttaagatactccatgattttatgtgcccataagaaagaaaacttgctgccaattataatgtgacacagattgtaatcttcagagaggttaaaatatattttttgaaaagtttgactcaaaatgcctactgtgtaatggattgcaccttgagccctcacacacaggtaggcaatattgctatctcctgttgtttgggggaacagattgagcagcagaggatgaaagcatcatgcctaaagttacactgctggtaggaataagcaggatgtgaaccagggacaccagagtgcgtatgtctccagtcatctgtgctcccttccaggaagatattgtcctgtctcacaggtcttggagcagcttgaggaaaaatgtccaggcttgtttgtgcgtggtgagggtgtgcctcaagaaccctccctggctgatgcatcctgttactgactgctctagagagggctgtcccgtctcctgccaccccagtgatggggatgaacaatcccatagggagaatcaaccagggaacttgaacactgccagaagttcttggaaggaaaacaatctggtgattttgttgaaattgggatctagcctttattttgggtagttaaaataagcctctgggtgatatattttgggcctaattaccccggttttcacagaggaggctattgagtgattaagtaaaggtaaatgcttggcatcatagcagctccagaaattcagagcagtttgttcaaaaagaaaaaagaaggaaattggaagtcaccttgtcctctgctgcttcacctcataatagtgctggagactccaggaggcatctgtgtcatcagagactgggcttcaaagctctgacttcacttttcactcctgggacaccaaattggaaatgacccatctaagcaactactctgagccagaccatgagcccagagactgagtcaaggactgcagcaggacagtagcaactcctcccaaccccagtccgtggcaagcaggagggaggacagtctaggatacgaggaggtgtggttctcagccaggagtggttagttggctcttggccttcactcagcacccctgtaccttgttgaaaagtaatatttataataaagctatcatttaatggcacaggcaccctgtatgctaggcaaatagctaagcacctggtgtgttttaccttacttcacctgcatcaggtgctcatattttactgagataactgagacacagggaggtcatgcaactggcccataaccacacagcttgttagtggaagaactaggatctgaacccagggagtactgttttggagtcgctgcccttaaatagtgtattgtacactcctaagcgatgaataactaaggttagtctttaggaatcaaacattttaaggataataattgagcactttgaactcagttgccgccttgcctagatcatggaatctaatgagatcacctatgtggcaactttcagaaacataaaatggcacagaatttttggtggttttatgatgacaatgatatgtttaggattgatctcctaaattctggtaattaaaccacaaaaactctaaacttagaaagagaactttttctttatgtgagtgttggtacttatgaaatagcaggcttaacagaagaggacaaggctggcatggagtttgcaaagggttctggaggcaaagtgtccttctccttctccttctgcctttagctcatctccaggcacggttcatcttggtccctaaagacctttcaactctaaatgcttccttcccattgagatcgctagcctgagtctagccacaaccacctcttacggttgtccttggcctgcaggacagtgtcaatgaacacctgctaaatgaatgaaagatgtttactgtctacttttatttccacacaaaccatcattctttttctcaatatgcaagtgttattactgttagctttatgtcatgattagatgccgagagtaagggttgttgcagaataactggattgagtggaagacaagactgggggtggggagcggaagcatcccctccgcagaatgcactgtcggtattaacagttcacatttatggaccgtttatgtgaccaagatggtaccaagcactttaagggcattctctaatttagtcagtgaggttggcaataattactgtctcatctcaaagaggaaatggccattagagagcttgaacgccttcccagcattgcaagcctgggaaggaggaagctaggatttgtatcccatccgagtctgccagggctcaaagcccatcttcttaagcagctcactgtatgtgtctaggaacttgttttcctgaggtaaaattaatttaattgagaaaattcctgaaagtgtatgtgcaagggtatgtttgtgtcatatatatgtgtacctgtttgtgtgtatgtgtatgtgtgttaaggggagatcagggaaagaatcaagttaagaaagaaaatagtaaaaaaaaattagacaagagacttgaaatgacagtttgtagccaaaaggtggcattgtgagcttggggtagcttggttgcagcttaatatggtaatatggatggtgtgcaagttttctggaggcggaagcattgccttaataaggactttggtgaacacatatcagggcatactaggcctaaaatatatatacaaaacatagattcatatctcaattttcaaaggacctgtagcatgtctggacggaagtcatttatcaaggtagacttcacggaactggaactgggtcttgaatgccacgaaaaactttaatggctggagaggaaggcttggtgcattttaagtgggaggagcatttcttgccctatgccttcttgcagtctgcgaaactctcgtcattctgctaggccatctttccggttgttcgttgtccttgtttcagttacaacattaccacatgtattggaattttctctttacctatctgtgctccacagtaaagtgagacccatgtgggaagggaccacttccttttatctttccattcatccttccatccgtggtgtgtagcaggcactcaattcaagctatggcagtaaattaatggaaagaacaaactaattgaaggaacaaattaatgacaagctttacaaagttcaatttaaaaaataatgtgaataaagttttgtttcatgccaatctttcctgtaaagattttttaaaatataaaattcccaaataccttactagctctgggtgacagaattttttcaggcaaactaaaatatgacagctggagcataaaagagcatgcttcattctccaaatctttcttccatcccatgattagctgctgcagaaatgagaattaagagggaatatgaggttccttgatttgttaagatagctactgcattctccctgctgtgtccaatggagcagacctttgctatgggtagggagtgctcctagataatgatgatgatgtcactgctgccattgctgttgctgctgctgctgttgccatgaaagtttcacttgactcagtacatatgtgtattagtctgttttcacacggctataaagaactgcccaagattgagtaatttataaaggaaagagatttaattgactcacagtttctcatggctggggagagcttaggaaacttacaatcatggtggaaggggaagcagggaggttttacacggtggcaggagagagggagagagagaagggggaagagcccctttataaaaccatcagatctcatgagaagtcactcactagcatgagaacagcctggggaaaactacccccatgatccaatcacctcccaccaggtccctccctcaacacatggggattatggggattacaattcgagatgagatttgggtggggacacagcaaaaccatatcaccatgcctcgtgtttctgcagagtaggtaagttcaggccctggggaagctggtgccaaagctggggccttcattggccacatagggactgcagctgtcagcacagagagagagagggaaagagagagaaatagagtttggaaattgttcagcaagagctgggaaatgcagtcacacagaagaatgactggtccatcatcaaatcctaatgaaattacctccaaatatctcggtgcctttcagcttctgttagtggagctggacaaatctgatttgagacaagtaattttaagcgtgttcttaaaggtaagactccactgtatctcttgtcctatttcctggcagtggaagaggggccagctttttcttgtccttggagaacttgagaaacagcgtatctgccatttgggcgttggctgagtacctccatccctgacattgctttccaagtgctgtggaactggggacaagctatgtggtttgaaaggagttgacaggctgggagccagtgtcctcctttcctcaagaagggaggaggtctcctcattccacagctagaaagtctcttcacagtgcagatccccattttgcttctctgtaaagtggggctagtaatggtcattacctgccaagcttgtggtgaagactgaataaaaacatgtttgaagctcacttcacaaggcttaacacatagtaggcccttggttaataatagccattattattcctcttgtgggctcctctccctgctttgacacaagtgtcaggaataagattacaaattattttacaggcctgcctttcaatctttcctgcatttgtgaagtaatgttcagctgttgctatggctgggctgtgaagaaagcctctgtgaaatacaataaggcacactgtgtctgctgtgaaggcctggaacacacattggaaggagaaatcctatcatgagtgtccttccctgggggtgttgttgagggtctgacaattcctgatatggtttggctgtgtccccacccaaatctcatcttgaattcccatgtgttgtgggagggacctggtaggaggtaattgaatcagccaggcaggtcttttccgtgctgttttcatggtagtgaataagtctcatgagatctgatggctttaaaaaggggagtttccctgcacaagtgctcttttgtctgccaccatgtgagatgtgccttttatcttccaccatgattgggaggactccccagccaagtggaactgtaagtccaataggcctctttgttttgtacattgtccagtctcaggtatgtgtttcttagcagcacgaaaatggactaatccactgcccctgggaaaatcctgttggaacaactgctaatgaaacaggctttctcacaaatctcaggcccatcgcccccgtccagggcactggctttaagtgactcaaaggaatcaattctgtcaaatgatccttcaaaatcaaaacccatttttccagatttatgttacattcatgcagtgatgcatttgtgtagccattaaatgatatttatgatgatttttaacaacacaagactattctgtgaattctatgtagagagagggttgcaggaatgaagcagcaacgacaacaacaataataacaataaagtcatcaaggaaactgaagttcaaggaggggaaagaaatatggcccctcaccagagggcttcgatctcccagagctcagaacatgttctaaggctcacattgtgttagcatcttctgcttaaagggaacatgacttgcatatttctggagttttacttttaaaacaatttcactttccttctataatcaggaaaaacaacttttttttttttttttttttttttttttttgtggtagacagagtctcattctgtcacccaggctggagtgcagtggtgcaatctcggctcactgcaagctctgcctcccgggttcacaccattctcctgcctcagcctcccgagtagctgggactacaggcgcccaccaccatgctgggctaattttttgtgttattagtagagatggggtttcaccatggtctcaatctcctgacctcgtgatccgcccacctcggcctcccaaagtgctgggattacaggtgtgagccactgcacccagccaaaaacaactttgacactatttctttaaaaataggaattaaggggacagtcaaacttactgaaacatttttttttttttttgagacagagtctcactgtgttgcccaggctggagtgcagtggcatgatctcagttcactgcaacctccacctcccaggttcaagggattcttaagcctcagcctccttagtaagtgggattacaggtacccaccaccatgccctactaatttttgtattttagtagagacggggtttcaccacattggccaggctggccttgaactcctgacctcaagtaatctgcctgcctcagcctcccaagttctgggattacaggtgtgagccaccatgcccagccctgtaacactttcatgtatacaatttcacttttcttctgaacagtctgtaaagccagagaggcacagggtttcattttaatgatagaggtgatgtgtggaggtgaagatattattcaaaattatgcagaaagtcaggggcagaagtcaggacccccagcctgtcctggtctgtctctcttcccctggactgcttttccttgaaatgtctccattatcatatattctcccaattcattcaataaacatatacaaagcatttacagcatctcaggcaatttgagaagcccttggagagtcccagagatggaaatgacaattgtgtccccccagaattttctttctggtggagatgagcatgagagattgacaaaagaaatgtcaatataatatgaaaagtggcagcctgcacaatgtgctctgggtacttggaggatggagtgactaattccatggtagcaacgggggatgaccagaaaaagttatagagaggaggtgacatttaaattgcaacttactgtctggcatcggagttaggagcccaggctcccgagcttggcagaccctcaaagaactccagccttcaccacctcctacctgtgtactctgacagattacttatctccccctaagcctccatttgctcttctggaaaatgggggtaatcataaactaccttgtggtaatttttttgaagaataaatgagataatgcaggcaaagcctttagtaacagctcattgtaacttcaagaaactagagtttttattatcactatcagtagtaataatgcgactctccttttctttcctctaaattaaaattatttcctgtggtagataggtaatggaatagtgtccctggtagggaaaacagaatttgcaaagttactgatatgtagcagcctctgactttttggaaagtggcaaggagatggggttgggggaagtagaccagtaggaagttaggctataagcgctagagtggcgttagattataaggagacttatttgtaggggaaggaatttttatgctctaggatggtagtgggatgcaactagagatataaaaaccagggaatgacattgctagatgtgtgtcttagagagaggccccaggcagctgtgagggggtggaaaatggtaagagaacatagatgttgaagaacagtgcaggggtctacatggaagagaccaaggatcccaatggtgaagtctttcaattaaactaaacaacacttcctggatttggacattacaagatgaggaaagctgctcctactcttggagtttaacgtatggtgggaaaaggggaaggtaatgagaaagagccacaagagaatatgtattggtctgttttaacactgtgataaagacatacctgagactggctaatttataaagaaaagaggtttaatttactcacagttccatgtggctggggaggcctcaggaaacttacaatcatggcagaaggcaaagggaaagcaaggaccttcttcacatggcagcaggagagagagagcagtgaggagcgaagggggaagagcctcttataaaaccatcagatctcatgagatctcacttgctatcatgagaacagcctggggaaaactggccccatgatccaatcacctctcaccaggtctctctgtcaacatctggggattacaactcaagatgagatttgggtggggacacaaaacctaaccatatcagaatacaagaatagcatttggatgggttcaaaaggaggcaatgtgacattcaggtggggtgaatcagaaaaagacacctgcttattgtcagaagctgcccaccagcccctgagctctttggtactagggtagtgtctgcactgcattttccgctcagtgtccttggcacctcacctggcagagataaggggcttgatgactgtttactgaaaaaagtgaatacagactgaggttcatctgagatttttggagctgaggggtgcatattagtggagatgaggtagagcttcaatccttgaaacccactccaggtcagcagcctgagtttatgagtgctgatgttttgtgttgctttgattttgttccctttgatccctgactctcagctactgaaggtatattgttttttattttaaaacaaaaaagcacaccaaagacaatgacaccagcaagtaacttctcatcacctccatcacccatccgtgatttctgtttgtagaattgaatttcatcgggcttggtgtgctcagtggaaacactgtgtgaatcactctcaagttcagcagttaacatgactcagcacttggttcatgagcaagaaggcttttctgtcagcataaccagggtatcatagcagtgtgtctgctacctgggaaaccaagatgaagcaccaagtagaggtcaccatgtttaactaatgatttaagaaataaaggtttttgtcaggagcaaacatatgggtttcatttgagtaaaatctaatatagtatacttacggattctaagaatttgtgaaagccatttatgataataaaactcttatttgcttccaagcaaatgatcttttggtgcgattttactgtcttttcattttagttctgctttgagccaaggcaaaatgctttgcccaaaatgttcctttagttagaccttgtctcttaaattgcattttctccagaatggactaggtcacatgtaataaattctggcattttaatagaaacattacagggaaaatagtcaacaatctgctttaatttcaaaagtcatttactctttgatatggtaaggcagtatctggtaaaatgtgcagaatgcattgggatttacttatgatgacaatttattctgaaacaatgtgaaactggaccatcaatattcaggacaaagatcttggcagggggaagggtactgggagcaaacattagtgtctttttattcctgggtcctgaatgccatgtagacctcagggattacaggtgcacgacaccgtacccggcccctctctcacttctcaaatatcttctccacatagcagccaaagcaatcattgcaaaatttggatgggaataacattacactctcacctcaggagagttagaagccttgggcatattaccagtggcagaccctaatttctataaagagctgagactagggcatgatggtgagaagatggaaaaattgctctttctattcctcagggacttaagtctctctttgagaagactggttatttgttctgggaacaaaactaaaaaaaaaaaaaagaaaaaagaaaatcacacgtacataaaccaaaaccacaataatagatcatttaattctaggaattaaataatcaatcattttgggaatatactatgaaataacttgaatgcagatattctcaattaaaaagataagtattctgtttatatacgttggttttatatttgataagtgttaagtttctgaagatccttttggttttggtggggagcagaatgaggatagagagaattgtttctttatgtatagatttataccatatatcattcaggactgtactcactatggtaccatcctaatatgaggactgaaggaccagggataaactggtgtatgcccagtgaatctaatgtactcaataatttatttctgcaatgagtatttaaaccccatggtggtacatgatggagatacaaaggcaagcaagaataagcgagatggcttccttaggaagacttcagtctagatagataccttgatcaaagaatgacgcagatatatgtacaaggacaactgcgccaaggacttcgatggtaaggtcccttgtgccaggcaaatgtctaagaggggtatttggcatggtctgggctgagttggtggtagccatgggaggcatgacctgggaaaccccaacagagctgctgggcagggagggtggtgtaggtggggagtattgaaggcaggaggaacaggagccttcagggactgaaggcgtggtaggtccaagaaagccaagaaggctggctgagactggaagacaaacaccggaagggcctgtggtgggagcttacaggagaggcagggcaggatgtgcagggcttcgggccagagcaacatacctagtcttacttcctaagtatattgggaagccactgaacagttctaagtcagagtgtaatgttattcccatccaaattttgcaatgattgctttggctgctatgtggagaagatatttgagaagtgagagaggggccgggtacggtgtcgtgcacctgtaatcccagcactttgggaggttgaggcaggaggattgcttgagccaggagtttgagaccagcttggacaacatagcaaggctcagtctttacagaaaataattattttaaaaaaaacattagtgggttgtggtggtaagcacctgtaatcccagttactggggaggctgaggtgaaaggattgctggagcctaggagttttaggctgcagtgagctatgatagtgccactgcacttcagcctgggtgacagagtgagaccctgtttcaaaatatatttaaaaaataagtataaaagaagagattgcatgtggggagacctgttggggaggttcctgcagaggccagttgagaaatgaagtgggtttagaacaggatgcccacagtggagaggcacgctgacctgagaacttggcttagtctggcaatgagagaaccaaactctgtgtgttgccaacggatgcatccctgctctttatgggctgagagttctgtaggaggcagagagaaattagacatttgcaaaacctcaggagtaggggtggtatgatatggtccatcgaaatttaggctgtaaattggtgaaaagaagatggggaggaagttgaggtgaaagtactcaaaaatgggattatgttcattaaaccagtcaaatgtggtttgtgctgaatgctgacagtgttggattaggatttgtcccccgcactttttcttgcaagcaatgcttgatgggcgtagtgatcataaaacatctttgtttcttggcatttataaaaagaaatacatttttagcatacagcaagttgccttgagcagcttaaaatgagagccttttcaagtgaaggttatattgaggattcagctcagctaatgaaggtaagaacgggtttcaagtctagccttatgcttcctggaatggccctggcccctcacacattccacccaccaaccacattgctcccaacacctacttccccacaggattgctataagcccttggacaaatcatttagccttccttaattgacttgtgcttaaaatggaagggacctggctcttaaagtctcttttacctctaggatatttgattccacacaacaagaatctttaattcccggagtgctgtgctgtattttatgtgcccatgtgctcttttgaatcatgggcgactttattacttaacattaactgtcgtggtttctggtggatccttctttttttttttttttttcttttttttttttgagacagactattgctccgtcacctaggttggagtgcagtggcatggtcacagctaactccagccctcttgggtttaagctatcctcctgcctcagcctcctgattagtggggaccagaggtgtgagccacactcttgactaattttttaattgtttgacggggtctcactactttgcccaggttggtctcaaactcctgagctcaagcaatcctcctaccttggcttcccaaagtgttggtattacaggtgtgagccatcgtgcccacagaaagtgttcttcccttgccccgagaaaaacctgtttctgaaaaccactgcagcttcacggaggtatcttcctttctctctcccaatttacttcaatccacaaatgactgaatatgtgcttgttgagcacctggcccaatgtgtaccctacattgtgttcttggctgtcactcagttcattgtcaaggcactcttgggaggcagggggtatatcagaggaatcagaggctcacagaaactaagcaacttgctcaagtttatgcagcaaaaataagatagcagactgctgtcaaacccaagacttctgattctatgtccagggtttgtttttgttattgtttctctaaattgatgtttcccaaagtgggagactcactctccaggtgtaaacccaagctggttttagatggttcgtggagaaggcaggaaaaggaatactgaatcacatgacaggaaagttgttttcttttcaattctctctcaaacatcctgtttagtcaagtagaaaatgggcttggtgtgaatgtgcctttcgtatgtgttgaatatttgctaatctcccatcttaacagagagctggtctcaggcttagcagcctcaatagcaacagggtttagcaagaacttaataagatatttttatttcatattctatttttggaacatgatattgtttttcttcacattggcgatataaatttgccttttaaggaaaaaaattaagggggaaataaagaaaagtactggataaattagagttcaggtgtctgagtataatgatacaaatcatgcctgtacatccatggaatgaggctgggagcagctctccatttattcatgctgcctccctcactcacgggacacgcggggcttcatgtgatcatcgtgacactaagttctgaatctgctctttatttatttcccttagaaatatatagaagcaattataatgaaagccatacttgcccttaggaccattgaggtgtccttcttaagcatacattttataactgaaatcaacccaagctagtaatggagtcttaaaacctagaaaaaatatgtaagtttattgcaaaagataatatcccgtttaaaacagtttagaaatttacaaaaccttacatcagtacatcgtctttaagaaggtgctctatagatgagctggtattaagttccaaggatagtgagtatgcatttatgcattgctttttaaactacagagaaagcagctacataaactcctgcaatttaagttgatgtattggtctttttcctttcaattttataaaagtaatttttgctaagttaatatctctccagcaaaccagataacctcaagtacagcatttctgtagaatatcatggtagatgttacgtaatattttacaaagaagcagtgattttcacatgaataagtgagtatgcagttttggtatatgtgtgtgtggtgttttaaacatagagacgaccatttttgttcatcaggaaaatgtttatggaatcctatttcctcataatgattttaaatatcaatttttcagaagagaactccttcccagtttcaggtcagtggcccaagcaatgcggtgttgtgctttggtgtagaatcagtacagccttgtttggctgtatttctagaaatgtcaacattttatttatttttttcttttcttttcttttcttttttttttgttggggaagtgcagaaaatgtcaacattttctagtcccagttttatttaattcagttaagggttcatgtgagggcctcaactggaaacatatctatgaccacatcagcttattaattttgtgtgaggtacctcaaacatctctttatcttcccaggctaactttggccagtaatccagctcagctctgagtcactcagctcacataatgtggaacgtgctaagagtttataaagtaggaaagcatatgttcttatctgtattcaagaatggacaaacaggccgggaaatttaagccatttgccaaaggctagtggtatagactgcttggttgcctggatctcttaattctgggaacagggttatttacattctagcatgatgcccgagaatataaattcacatgaaattagcgtaagcaaagcaaattaagatggaagctctactacaagataaaattacataagaggtcccaaatgatttcactttattggattatcctctattctgttcttttccattgctggggccaactgacagttgatcgtatggatacaggaaaaaaaaaatctgtggcttttagccagtggtagcatatcttattgaaatgtggcttcttaagtatgacaagtgtatttatcttaattctaacatgacgttatatattccggtctgattctgtgggcttaaacattacactagaaacagaacaagaacatcttgaatgacattccaagacttaaatagtgcaagctgatattccttgccaaatttccctttcattctcactgaaatagctttgttcactgcatcactatgacaggggaaggtgaaaccatcggagtggtttgctcaattaggctcaatttgcagtggggtaggtacatcccacgaacacacaggattctgtgctctgcaaagattctagcttagacactggatcttcagccaagggaattacaaaataccttcttcgtttaatgtatgtttagtttcaggctccctttctagcaatgtcaatctaaccacatgctgatagagattttaattcaaccagaaggaatctgagcctttccatcctacccctcatccacaagagtatatagcaattacttaattatattactttagtagtttgttcagccatgcaagtttgactggatccacatgtatgtaggtcttgtcaacagaatgagccagaccttgaataactcagactttgggatggaaagatatttaaacctcaaatagaaaaaactatatcctcatccatagtcctgctagtttttcaatcaggtgaccattgtctggtcaccaggaagggagactgtgtcgattaatatatgtttgaacctatctacacggctgtttctgggatgaagggatgagaaacagtgttgtgttttatcttagccttatctatgttactcataagatgtaactgatggacaggttgctggatctcatgattttaaatattgcaggtaagttaactatggagtcttaaagttcacaccaaaaacagattccacccatttgccaggtggtctcaggccctaggcagagaagaagcatgatggtttagggtgggccctggaacagctacagctgctgaaatcctctttgaattacacttatccagcacagccacaccaacaagtttataccctggggtggcctgactctgccacaggcagaaaggtgcatgcaccatgagatgacagagccttaatttgggatcaaggggctaattaaaaaggaaaacaacccaacacaccagggtgatcttgcataagcattttatgccctgcccacttctcttgtgcttattatgtatgctgatatcttagaaaactgccagtttatctcatttttttctatggtacctgcttataacctataacctccctctaccttccgggtctgcacaacactatttttttcttttgggtttatgaacccaggatgggaaggaagtgcttggcatcttggaggtgttggaaggtgtagtgtggggttttgctcgtggtgggaatctggtcttaaaactcagcatgagttctggctgagtgtgacagggaacttggcaagcggtcactctagtgtccgtgaagccctcagcaagcagtcgcacgcactcaggtaaggatcgtggtcaggtgtccagcagcggctacatcagctccaaggctcttctgtttcacaggccaaggggctcacagcccagggcctttgcaaagaagcagggcaggccttaagtgcagtggatttcccatctcagggaagtgcgtggagttggggggctgggggatggtcccaaccagctcagatccaccagaagcatttctttttcaccttcttggttttccgccttaagtcctgcttttccggggctgggggttctgctggggactttggtgggggcgatgcctcctcaactggctctgcttcctccagactctgcaaaacttcatggaacctgccttcctgctgccgaaaatcatactctacactgaaaaacacagagaggaaggaaggaaagtgaattcgaatcagcacagactgattaagcatctctcagccccaactaatatggaagagcatgagctttgggatcaaatcctagatccttaggtacctactggctctttgaccttgggaaagtgatgccacctctctgaacctctagttcttcagtgattgaattggcacctgtaatgccttcctcacagggatgttattaagggtcagtgagacctgatggcaagtgttctgtaaatattggctccagtctctctcttaatcattaatggggttttggcatgtgttatgcatgaaaactgtctcattattaaaaaattgagataatgcagaggaacagacaagaaaactgacagctcagtttcattatctgtaaaatgggggtaataagagcacctatctcaaaggctttctttggaattaatgtgtgtaaactgagataatataaatgaaatgctcagagtagtgcctggcgtgcgctaagtcctccgtatgtgttagcttctattaccgctatcatcatcatcattaacataatttctaccaatatattacgtcttgctctttgaattgcatctcaacttcaagatatatcttggagagctttacatgtaagactgccttgtagtattcctcaatacagtgtatttaaatattcctctactgatggatggacattcccaacctctttttcgttgttgttgttgttggctattttacttgtgtgttttggtgtcattaacatacggactgcattgtcccgtgctgattatcacaaacattgaggaggtaaaagtgaacctgtcgcagagcaggggtccctgaggtcaggggaggtgggcgttgaacagaagcctggcctgtagggagtgggtgctgatgctgtctgtgacctctgcatgtctggaagtcaggccagcagacctcagggactctcagcctgcttcctcactctggttcaccctccccagaacccagagagccggggcagaaaaaacgaatcctcttagacatccctgtgggctgagcacgggttccctctgtccttaattgtctttcctccatgaggaggatttacttacagaggagttttcagtgccaagatgcttataagaaagctcttaagctttttgatgtgtttgttacctggtttcataccaggggtctcagaaggcccaaggatgaggagccagcgtgggagtgtgggaagtggaggaaacgtggtcatgaaaacagtgcattctccttgtttagccagaaggaaaatgaaatgttgcatctgggagaccaaagaccccatgttggtttatgatgtggcatgactggccagtgcctttatacccagcaagggctggaaaacagctgtcattaaagggacatctgcccttgcttactctccccatgtcacctcccagggccggggacccgagttcatgctgctgcaaaggcatgttgccgttgccatgcatgacgaatggagccccaaagagtgcctcgtccctgagcattctgagatggaagaggcagggctgaagaggggcgagggggcctgttttatagactgatgggtgtgggctgaagagtcagaggggcgagggggcctgttttatagcaagactgatgggagggtcagaggggcgagggggcctgttttatagcaagactgatggggtgttagttcttagggagcactaggaaagggtatctgattgttttgtttctgcatttttcatccaggcttgcttctcctccacttacatgccttctctttctgttctctctggccctctctatggggacataatcctggctggatgacctataggccatcattatattaaattagaattgtattgtggatgaaacataggctgtggtttttaaagcaaagccccacagtttcactgtgagatcttggggaagtcatttcccacttccaggctatggtgtcctcatctgcaaaatgagtagtgcctacgcaaaggacctcagtgaagcttaaatgccatgtgcatatacaacacgcagcatagagtaggcaccaagtatccagtcagtcactcgacaaacatttattgagcatcttctttgtggcaggccctgttctggctgctgaggaaggaatggtaggcagacaatctccctggcctcctggcactgctaatccagtgaatctgtgtcctcagtgctggcatcagtagctgttagagaccttctagccaaagcccagaatttgccaggccagtgggcagaggcatgtgcagactcacatactgactgtctatttcaggagtctctatttcaggaaaaactctgaaaccatgtttttcctctgctctcacaccacaacaaccatcaacacagaagaagacttctatgaccaaatgtgtgggagtttctccccactaccaagcagtggccaccagttgggtgtcttccaattcagttccagtactatctacccagagatagcatcagattccatagattgggggctcaatcccacaagacttccccccacttacaagtccgggaccttggaacttctgactgactagcttcaagttggggttcccaaaaccccttctttgggtttgattaatttgctggagtggttcacagaactcagggaaacacttccttacgtttactggtgtatcataaaggatattgcaaaggatacagatgaagagatgtgtgggggcttcagcccctgtgtagcactcattcctccagggtatgggcaggacccactctggaatcagtctcttgacccacaatcagattagattccggccttaggcaggtgacaggaggacaggagaaggtcagagaaagagactttgtttcctgaggcctgctcctgaggcctaactcacccaacgtgataacaaaagattgtaacaagggctatgggagttatgagccaggaaccatgggtgaaaacctctctgtctgtctgtctgtctgtctgtctatctatctatctgtctgtctgtctatctattgatccatccatctatcatctatctaatctatcatctattatctatttatctatctatcatctatcatctatcatgtatctatcatctatcagtatctattatctatcatctatctgtcatctatcgttatctatccatctatcatgtatcattatctatcatctatctatctatctatctacctctagcatctatttgtctctatctattgatccccccacacacatagatcgcacacatacacacatatataatcataacatcacagtctcttcttccaggaggcatcacctggtactgcacccctatttgtctggggtgtggtggagtgggtttctgtctgcaccacctatacttcattctccccagtggaaactggagatggattgagagcctaggcaacccctgcattgcagcaaggaaggactttaacatggtgagttgcaagctctgattctcgcccctctagcaccaggaacacacatagttcacagatagggaacatctatattcacaatgctcctagctcctgaaatagccctgccctccctactgtgacagaaaaacaatcttcatcatagagtaccagatagagccaaagagagtgggtaccccctctaagattttaggagtctaagattttcttgtacaaaacattccatccatcatcagtccatcctgctctgggcctgacactgtaccaggttccaggaacacaacagtaagttagacagatgtggatactgtccccagtgtgtttgagataggtgattaagtaacaattgctttcaaaatgtacttcttatttctctgaactactcctactttccaattcttcatccatatgcttccaccaaattatatgaatacacacatgcaccaactgccttcctctccttatatgtgaagtgtctctgacttcataattcaaataaacaaacaatgacaacaaaccagctgagtttgacaagatttacaagtgtcctaatacctgtttaataaaaataggctgggcgcagtggctcatgcctgtaatcccagcacttcgaaagacccaggtgggaggattccttgaggtcaggagtttgagaccagcctgggcaacatagcgagacaccatctctacaaaaagtaaaaaattagccatgtgtggtggtgtgcaactgtgatcccagctacttgggaggctgaggtgagaggatcacttcagcccaggaaattgtggctgcaattagctatgagtgcaccactgcactccagcccaggtgagagattgagttgtccccatctcaaaaagaaaatgatattaatgctctggatgattctagaatgtgtatggaacttgcaggcctgggtagaaaagaccgggagatggaacggaaactttatctcaccatcacaacttgaagcccagcccaacatagaggatggagtgagggccccagagctgaatgctcttgggtttgaatggaggctgcagcacttcctggctgggtgaccctgggcaagtttcttctcttcccacggctcagttgaacttgggagttacactagcttcctcgctgggtggctgtgcagatgggatgcaatagcagctgaaatcactgcacatggaacactgtcttggcccactccactcttcctcactaggtcctttgccttcccatctcagctcctcgcatcaaccttcagctcttcagtagctgcgcaccttaccagcagcatcactcctcacccctccccaccatctacattcagggaagaacacactctttatgtttctatggaaacacagcagggtttcattataatcactgggatttagggagctccccactcccctcttgtgactgcccccactggtcttgaacaatttaaaggggattgaaagtaactttcttttcaaggccaggcaaatagcagaatatggagaagtgtgtgtgcttcggaaagaaattgattaatgttttttaggccaaagcaatttattaacataaaggaaaattgccacttttctttttattcatccgtttgacacactacagtttggaagggaggagagggagtatattttgctttggtggcagctgccttataaatggggagggacagagccctctcatctgctttttatcttgaggctgggtagaaaagagaagatgcatttctacttcttacttagctactacaccatgcttagcaaccccttgcaaaaaggagtaagttgccaacttggtgaaaattgaagttaattcttagcagagcgttgtttgcagacagtgggagagactctctgctttgggtttcagcccaaggatccaaatagcacaccaataacttttctgacctcacctcgctttcactgcttccacctactctctgtaccctcccatccttaccatcttccaccatccatatttcacatatgctgtatattccatgcaggatcgtaagaaggaagataggtgcagagtgctgagtttgcagaaccctggcttacagtggagggcaaatagtagttaagaaattgttacaatgcaaaattccggacacgagcccttgagatagtccagggcattcatggtatgtgagttggtcttcctgaggatgcatgggacatgggacctgtggtttagggatgctcagttaactgcctgaggtgccttagagcccttcacatccaaggagatgtctgaacacggagccacgttgcatttagagagtgagctatgtgtaaaccagaaatggtaagaactttcaggtttccctcttgggggtacctcactaatctggcttacagatcagtgctccagccatcatgctcgctgaaaagcagaaagatgtttttctaggtaattggaagcagcaagagccccaagtcatgacttggctggaagaagaaacagtgagtaacaaatagcaaaaaatagataagctcatgagcaaacaacagagcgaggttctggatgcaggatcttggctgggtaaactgaagttgggtgagccaaaaggagataaaaattgatgtagaaagaaataacagaagcctctcagttgtatataacttttgaatttgcaaagtattttagatctgtgggtttttttcttctttttttaattttttgattttttaaaattttattattattatactttaagttttagggtacatgtgcacaatgtgcaggtttgttacacatgtaaacatgtgccatgttggtatgctgcacccattaactcatcatttagcattaggtctgtgtttttattttatcctcatgatagcccaggaagataggaaggttgttgcccatttaaacagacaagcaagttggcaaagggaagtcatactgtaagttacaagcagaatctaaaccctatgtcttagtctgcttgggttgctataacaaaatactacagactgggtggcttatacatacatacatacactttatttctcacagttctggaggtgggaagttgaaaatcaaagtgctgttagttgggtgtctggtaagggccctcttcctggtctacagacagctgtattcccttgctgtgtcctcacgtggcagaaaggggagagggacctctctgagttctctttataagggcactaatcccattcacgaggactccaagttcatgacctaatcaccttccaaagtttctacctccaaatatcatcacatggggcattaggaattaatctgaatttgaagggtacacaaacattcagtctattcacctagtttcctgatacctagtcctttgatttttctgcttaaagaaggaccaaatgttttagccatggacctaactctttccagcattttattctaaggagaagaaacaaaaagagagtacctgggccacattagattaggatacatggtaatttaaatgggcaaaaataataattatgataaaaagaatgatggtcatttatggaatgaaatctatgtgctagacactatgctacaagtttacactccttctctcatgaattctcacaatcccatgggataaataatattaccttcattttataaatgagaaaactgaggcaaagagaggttaaatattctgccaagggcatgtaaatataagtgacagagtcagaatccgaaccctgacagtctagccccaaagcttctacactaagatgcactggactgaaataacatagtaatctgcatctgtatgaaattctgattgcaaaatatgtagggtggtgggggtggaggtggtggccaaggcctggtgctcctggatgacctcacagtcccctgtggaaccagacctaaactagggctggggtgcatgggggacgctttatggaccagctgaccagtccaccttggaatactctttctcaatttcagggcagccttgaaagggaggctgcatacccaaaaaaggtgctctccttctaaggaggcagcctattgaagataatatctggggtcagcaatcttgggtctggtatagcctgctgatgtctccagtgagccattttgcacttccttctcagcagtgggtcctgctcttttataaacaggcatgccgacaagccactgccatcaactacactctaagcaagttggccgagaagtgaatgattcatggcgtctccctgaagacaaaccatcttccaaattcccctccacttcttcttcatctcttgttggaacatttctgtggtccctgtttctacagaacccaggtgcaccactgatttactgacctcctgcaactttctcttttaaagaattagctgtaagaatcaatggatgcagcgagagtagtttggttctcgtccatttggataaatcatgacactttggaaggcatctctggggaagaattacagtctcggatcacaggaactttagtttgtatgtttttctctccccagcctggaagggatattgttcctaaaactttctcctaatgacaagtttgctcattttttatagggtttaattttgtgcttcacaacttgcagctatttcaaattggcaagtctaccccttctcctagggcatctatctgctgttgggtcttcagaaaatcacaggttctcttcttggcatgtatataaatgggatcaagctgcagaaatctctgctgatagctatatctgaaagaaatctgtgttttgggttctgtgactctgtgccagtaagatctgcatgtgaaaccctcagaaagggtagatcatctccgagaaagttaacacacttattcactgacgatgcaaggtcacaaggaaagaggggaagggacaggaaagtcttctgaaagtaggacctagttttgagccctggctccctgggatcttgggcagatcacttaacctctctgagcctcagtttcctcatctgtaaaatgggaatgttaatcctatccacattttaggatggttaggagtctggaatgaaacgatagacatatagtgttgggcaaaatgcctagtgcagtggctgattcaacaaatggtaatgattattacactaacttgatggagaaataaagatcggatcactctgtgatcacctgtggcctctgtgccagcagccactcatttgttattcctctgaaatattcaactcgtgtaattttatatttatggcatgtgtcagcctcttttgctattaatgcattaaaataggtttcattttttattacagataaattgctgatgctgtaaatcctacttcttttcctttacactctagggagaaaaagaaaggggtaaagccattcaagagaatcagggaatagagaaaaatgtcttgggaatctcctgttgggactcagagaaattttaccttttacattttacatgtaccccaaacttcatagctgtttcccaaagagacatttaagctgtgtttgctattggttgttttggagatgctcgagggcattgctatgacgttcacggcccagcatttgaaatagtgtggctcagtccatattggaatttgatgagagctgcaaatgcatctgtgattactagaataacagatatgctgtgtgcctttatcattattttttactgtggacttcattgctggccagagggaggactgtggctggaagacaaggttctcaagagttcacctggctccacgctgggacactgtcataagcagatgaaaggaaaatactaaacaatttaagtgaaaagttggctgctaaacccataggactgagtgcatattgcatttctagagaaatgcctttttctctggttaggtaatagctttgagtggcaggcaaggccagagctcagtggccaaatcgcttaaccaagaaggaaactcccagaagcactctcagacctccaaccgtgtgacctcaagcggctcacacagctctctggagcctctctctcctcagtgatgtgaagcccttgcttttctcttgcagggtgcacagctgtgaggctttggcctgcattccagggagcctccttgtcatactctgaatatgaaaactgtgagggggacgtgctaggaacgagaatgctggttgctagatacaaagggaggctcttgcagagaatctcctttacagaatccataagttcttctctgtctggtccagaagaatttatgagtggatgcatcaataatgattaaaataaaaaagcggccgggtgtggtggctcatgcctgtaatcccaacactttgggaggccaaggtcagtggatcacttgaggtcaggggttcaagaccagcctggccaacatggtgaaaccccgtctctactaataatacaaaaattagctgggtgtggtggcgggcacctataatcccagctactcaggaggctgaggcagaaaaatcgcttaaacctgggaggcagaggttgcagtgagccgagattgtgcaactgcactccagcctaggcgacagtgagactctgtctcaaaaaaaaaaaaaaaaaaaaaagcaattggtggtctgtggagtttgagaaaatggaaaatgagcgggtggtggtggcagattctgcgtggcatttagcttcatgcatggtccttggttcccaagcaaggggtgaccatacccctatcctgaagtgggaatgtagtggtaatggtcagcatttggacacccaccttttacacgtgtctgctgttgaccctctagggcccaccagagggccgttcttagcgtttggtcccttggccagggagcagaattaggctttaattactctcaacctttgttggaggaaaaatgtcagcctggattgccaatcagtttctgatctcagatgaggcctgagggactgagagaggtgggaggaaggaacggttacagctgaatctcccaagtattgcataatgtaagcctgggccccagaaaggcctgagagggactccttttctcttctcattggaaacaggaggcatcagaagatatgcctgctccatgagtaatcctctcctctctcttccttccctcgcccttgcctccattctcacctttacccaacatatataattaggtctatatatgatcatctaaccctaaaatcaaagccaagcagaaaggtaattcatctttccaaagatgtagtaagaactaaagctactctctgggctattttacaagcaagtattttttattcatgggctggttgtcacaaaactttctagtaaatcaagtatcttctttcaagaccctgattttttacctaaaaaaatccttctgctttatttgaaccaaccattcccagggagcttgctgcaactgcggattcccatcctccaccccacactctctgattcagtggctttggggctgaaacccagcaacaagtttccatagacacccaggaggttccgatgcagatggtccacgaccacgctttgggagcactgtctagggcctacatcttcaatgtaaaccctcacgatgcccttggctgagtggaactcagtgacaatcgaacattccactgagacctaatatccttcagatgagtctggcatctggaaggcagcatgctgtggaatctggcttgttggaagacagaactgtgttctgctgtggccgttgcaattactatttccagaataattgtgcaagtgcctcgcctctctcagcttcaattgcctaatctgaatgttgagcaagtgcctgacccttcctgagcaacagttccttcatctgtaacatgggggtactttaatcaatctcatcattgtgaggattaagtgtgaaaacaaaaggtacttcaagtgatcagtaaataatggatcctcggtaagtggtagctctcttctttctttcccttaagtttcagcccaacagatctctttcgtcagctgttatcattgtaaaaatcatcagttaaaggcaaataaactggcctccaattatgaggatttattctgagtgtacttatgtccctttgttgaaattaccacaaatttaatggcttaaaacaacatagattttactcttacagttctggagggcagaagtcctccagagctgtaaatcagagtgtcagcagagctgtgctctttctggaggctctaggagagaaaacatcccttgccttctctcacttttggggtctgccatgcctcctggcttgtgaccacggcactctgacctttgcctctggcgtcacatctccttctctgactctgatcctctggcctccctctttctctgcggcccttgtgattacactgggcccaccagacaacccaccctgctctcctcctttgaagtccttcacttcatttcatctgcaaagtcccttttgccaaataaggtcacatatgcagagggtctgtaggatgtggacaccttaggcattattttgcctacaagcctgggttttgatatttagcattagacatttagcaagagaacctgaagatctgatgttctaactcattctcccaaagagatcactgggacaattcagacaccagagaagggagatattttcacctggagggagttttgtggttccccacagtcaaactttgcctttcccactacagtcaggacagaagtcctgggcaataatgtctgatggcctggaagaacaagggtttcaatgtcctatgaaagtgcagcaagctctctgagtcatcaaagaaaggttctctcttgttgaaagtatgtggcattccagttattttgaaactggcaacctacgggcttacattcagcttaaaaagacccattgagaaccagttacatagaagccctccttcctaataagaatatttgcttaatccttcatttcctcacccaggagtggtggtgtacactaatagtaacaatgactttacttctggacaatttaaacagctgtctcaagtccactactggttttccttcctctcctagttaatagagtcatttctttctttaataagaacctactgagcaccaagtatgtatgagacactgatccatgactttgagagactagccatttgctgaaggaaagaaacttataaacaccatattacaatgcaataggatcagtgacctagcagatgagggctcatggcatgggggtccttctggggaaggattggattgtgaggttgtccagataactgacatttaagctgcaagactaagaaatatccacacaaagcagggcagaaaagacgtcccaggaaagcaaaggaacttatgtaaaggcacagaggaatgacagaaccaccagctgagcacctagttccccatggctggagaggagccacagactacctgaatcaggacaagattgtttagcgggggagtgacatggtcagattctatttttcaggtgcaagttagcaatctgcatggaggattacttgagataagggaaaagagacctgtgtcaaaaaggtcaattcacgttcaagtgacaaatgatgagagccttttctgaacctgcggcagaggaattggagtgaaggggttggattgagcagttggaatcagtagcttatttggcatatgaagagaaagtcaagagggattgtgatatctttatggagttgcctcttggtcaatggtgttgaacaaagtaaatatgggaagaaaattaattttgtggtgaaataggtgtgtttggggatatgacaaatttgagttgccttgggatatgaagtggaaatgtctgcatgtagttgcttgaaaattttagatagatagatagatagattgatatagatatcagataaaaggtagcagaaagtggtgccacagaaataaagtccatgagtgcagttgaagtgatgggaagaaactaaggataagacgaggagcagtctgtccaggtggaccctggacaaacaaaacctcttctatttctctcacctctctagcacctttcaaatcctacatggccaatctctctcttcacccaccgaaaaccgtaaggttgcaactctgtctttccaattcctgaacagcatgcttggatgggagatgaaaagttttctgggaaagacctcttattattttcctttaaaacatattggagacattttacaactgaaaccaagcagttttttcctgggagttatgtctagaaaagaaatgcgtgatctctgtaatcaaagacctctaaagaagcactgctgactatttttagcataaacataaagatgaatgctggagatatgactggaaaagtagagaagggagtgagggaaggaggagcaagtggcttagagggacctcgtgcccttgagaaggtgaaaaggagccgattccttagggcaccatttcccaaacttcaatcactcattctccaccttcatggtttttgcaagattccccataccatctacacagttattcacttcactttttttctctaaatccattcgctttttaaatttaaaaacatgttttatgtaaaacaggcaatatcacttttggaaatgcagacctgcatcaattacaaaaagtatttaaaaggactagttttagaagttaaagccttcaataaaaaaagtaaaaatgattgtattctagctagataactattgcttgctcagggctgtgaaactgagacctgctctttctttgcagagaaatgtgataagccagcattaggaaggttttaaagacgttctagtaccaaactcagattttcccctctaggttattggaaggattgaaataaatttgaaaagagaacaactttcttactaagtaatttaatgttatttaatcttggatgctatggtggcattcactcaaccctttgggtaacttgtgctaggattaatgctaaggagaagtgaagggagtgattggggccaaaacagcctggaatcagctggtggtttagagccaattgccactcacttcctgtggagtctacagtagtcaaaaccaaaggatccattcacctttatgtacggaaatccctgcaagctcctgagagccatggatagaatctctaggcattggtgttgggtctgtgctcttggtgagataggatgtatccaagtgttcaatggtaagaggagagccaaggaggcttagggagcagagagaaggagttagatagaaccagatgaccccacatgtcttgataagagcaagcagcatagccatagcctccagctgctggagcctctgggaaataccacttaggaaaccgtatgcatggctaatttagcagcaacatctccagagaagaagacccagtgggcaatccatcatgcgctggatcatgctgctttatgtacagtgacatgcactgagcgcatccatcatcggggagagagatcacggcttaacaaggcctggggatgagtatttcacatcacttattcattcgtttctaagatctgactttccagaacacaacgcaagtttgaagtcatttgaatgttttctaaaaaaaaatgacaactctcatcttcccactgttactacgatggggctgttcagatctctgctttcatcaaattaattgcccgttcccttgcaatggcttagatacaaggatatagattctttctgggagaacagtctggctttgaatggtaatgagggatatatgcatacaattgctgttcttctggaaaggatggtgtgcatgaaggtttgctaacccaaccaggggtgtaacttaatttagaatgtttgctggagatgtttgaattaagtgctagaaaaatgcaaacattctcagacatgttggaaggtcatagtttagccaaatattgtcacttttaattcggtttagaatatcagaatgtcagaactaaaagggactcttggggccatttaattaaagaccctcatttttcagatggggaaaatgatttgcccaaggcgaggtcatgaaactcatagtagacttggaaatcaccccttgccctttttacttatataggccaaatataaaatcattttaaggtaacagaaaatacattatctggctccggaaaagaagagagactatccaaaatttaaatggaggttagttcaaattaattcttcttgtttatgatgaatagttttgtcctctctgtctagacatttaataatttttgtcccttctaatgattagaaaatttgttcaagttagaagatataaaaaaagaagcagcaaaaagagagcaattgatgaaacttctgcttaggctttccaatgctgcagggctcttccggggccctcttttttaaaggaagacttcacattgaggtgaaaggcatttatctgtgagcagtcctgacgcttctgttatttgattaaaaacaggtggttcctctttgtaaggagctgatgggttcaatgaaaagatgctcaaggccctgcctaagtgcaagcaccttctgccttccaggcatatggtctcttactcattgaaatttcaggattctgccagagagaatgagaagttttaaaagaagacataggcaacccaattaggctccagtttgctcaggccctaagctgccagttttcaacaaaaagagaagtgtaatagagaaagcaaaactgttcactttggtcaacaaaattagatgtcgtcaacggaaattactgcttttgaccacttttctactatgccatggaaagtgggcttccagctaagggggcattgatctttctagtaaaaacaggtataaacccttgcatttgttcagaggtttgcagttacaaaacacattcacatatattatttcatttggtcttcatggcaactctgaatagggataattgttccctattcagataaggaaagtgagcccagattaagttagctgatggcagacttggggattaaaacacagatctttgactccaagtttacactgtatatcatgtttcccttttgtcacttataaaaatttactgcagcaaacttactctgtgctagaaggaaatgacatacttagaaatgaacataaagttcttatcatggttcttgactgtgccaagtaagggcttggcatagcatagctactgttgaggaagaggcagtgtggtggaataattaagatcacaggtttgggatttgaaaaatctggatgtgagtcctgagtttggccctttctgctctaggaaaatgctctgtgtgagcgagaccgaatgccttaactttcctgaaggtggaatgagatgcaaatgtgcatgccaagcttaccatgatgcctgcacttagtgtttgataagcctagggatgattacatcaaaagggtatgctcatagactttgttctaaggaaacaaagcaatccctgccttggaaccagatgttaacatttcatagttaaataccttgtttttgcctctcttgactttttgcatttaaaagtttgctagagtgttcagcggaccctatggctttatggtctacagagcaggcctcgcttgtggccaggtacctgtatatgatgcacgccgtgttctggcaggtactgcaattgttgagatcttggccagttcgataaaagttgcgcctgcaagacagagcatttgctggataaatctatgggcaaaagtcacgtgggccacaaacattcaacctacttgtcccttagtccctatagcacagcattcacggtgctctgaagttgcacggccattacaaataaggaaacaagaatgtcacgacaataggagctcacatgtctagaaggctttatacgtgttaaagatttctcaagctgagagttttttcatgctgacaacaatcctgttgtgagatgagggattctgcaggtgagtggaagggaggttattaaaactcctgacctcttagttcagtacatttcattctgcatcatcacagtgtttctctcctatacggcagtgctgattctgattcatacagcaaacagcagttaatgacttctctctcctactgtttttgatgagctttagccattgcttcttctttgtctttagagagcactttctgcagggacgagcatttcgcatctaaacaaataactgccttttcctcctatactggtgctgagtcacccaggaaagcattttgtgactttttttctctttgccgaaaatgaattgtgcaaaatgaattgtgatctcatttcagttccaattagttggtcattgatgggccagcccgtcatcaaagtagtcagtacaggggaaggtcaatagtaagctgagtggccatctcaagtcctttgtcacaatgacatgaagaacagaaatactgtacaaatgcagtagcttgctaagaggagggggatggggaagtgccttcctgctatcattttcccccatcatgtatcaatagaaccctcatcttcataaaaatcatttttgatcttactgctccattgctgcctttccccattctgttaacacctgaaaacgaaaacaaacagcagtagaaatccacagaaatccaccaaagcctagaactaaatgaaattccattagagaaaagggaggtctgtggttatgatttggagaaacaacagtgcttcaaacattttggagacatttttactaaaagaaaccaaagctgtctctgcccctgtgttggcaaatgacttcacccagtcatttttaatatgaaaaaaaaatctccttacccttcagtgagagctcgagctttctccaagtcttgaattacattcaaaaggactttaattttctcttggttcgagtgcagagattcctccacagattgcagtcggccttggaggtcgcagagttcaccccgtgccaggtgaatttgattaatgtcactaatctccctgttgctctgaagtttggtctcactccttgaaagagaggatgggagatgattacttcctggacaatttggaaactccagtgtgtctgactcggtggggttgtttgccgtctgctcctgacacccaggggcagatttcgatgcactgttagttttgagtgacaccagattctggtgattgttacttgatgaaggacagtctgaggctcttcctgggtgggctggctggctgtgggagccttgtgagggggaactgtgagtccgtggagatgaaggaacacacgtttcctttgactgagatgacagtgagccaaggtctttgtcatctgagttgtctttgggcaaaagcaattcaggtttaagttcctctgtgcctggtgtgtggctggcaacgctggtggcatttaagcaggaggtggatttttctgaatctagtggagtcacccttctcccatcacctggacgtgtgtcatccaaagggtgtatggagttacttacttcagctgacctgtctgggctgagagcagactctctagcttcccaggaaggactgtgataaatatcatctggaacctgaatggcagctgtggctttctctaaggacctccaagttcctgcttccaagcatatgctaacaggaccattgctttgcaccttggggacccttgggaggaatgcatgggacaccttgacccttcgaggcccatcctcaagatgctgagccaaccttaagtaggcaaggtcagaagacacaatgtcctgttcagagaggttaccgttgacctggatggcactttgggaggctgttggcatttccaccagggacttactggctgtgagtctcttccttttgaaaactgggaaatgcttcctgagactgggggaagtttggattgcaatgttgcgaaagccccctgccttctgggacctggggaaggagagcgagtaggtggggggaagatggtgcctggttgcttgagtcttccccatcacagccgggtcttctggagtttggacgtcaacctcagctaggccagttggattcttagtggtcccatcttccttgaatctcacctgctgggatttgctcctgcggtggtgaggttgtttcacaaactccactgattctagactgttacgctttagaagcacaggtctcactttcatattttgctgggccattgagcctcagtgggaaggatcaggaccatacacttctcctaggcacatctccccttaggtctttggagcagtatctaatgatagtatttcaatcatagagaactgctggccaggatggagtggtcctctcctcttagtatgggaaatcctgttggccattcccagcctctagagtctacgtaggaactatctgtaatgctttccctgcagttaaaatattaattcattgtagtcataattgctccttggaaaaacaaatgagttaggctaactattaaacatctgatctaccaagagagctggtaggcggtttatcaagggaggctggcacgcggttctgatcttggaagaagctggctgtcttgaacaaaaagacaacaaaagtaccatttagggggtagtgccagactcccaatgagtgaattccaaaagaaacctgctacgtctagaacatacagctttttgtttcccagagcattaatttccagggtgaaactgcaggaaacttaaatgcatcttctttccatagcaggtaaacaggtggagaaataaatgacctggaggtttgcttgtttgatgatacatgatgctcccaagggaacattcccatttatgtcaatcacaaattcctcctttggggccattgttttctttcatgctgtctctcttttcttcagtgagggaaacttatcttcctaaatagcctcacaaaacccagtggggtatgaccaggacaggattgaggaatcacaggggattcagtgggcagagtccctgttgtggtgtgttggccgaagttcacatgtgggcacggtgagctacgtctgcagcctccatgatgatgtatgtttgcttggcctcaggggctgaggtctgagatgagctggggtctgatatctgcaagcaggcgaggagcacctgaaagggaagagacaacagtggccaatgagaaggcagtttctgtggacctggatttctcttcaaattctaacttcctagctgagtattttgagtggagggtctaggaataagtcaaccacgtggcctttctctcggttctctttgtgaaccaggtgctttgtgggtgcaaggccttggaacaaaatgcctgtctgcctggacccttttctctctccatttctgcacagcactcagccaactcctgttcatcagtcaagtcccagcaatttctcaggcagcctttacaatgtctccctcttactcacacacccagtgccaagaccacatcaggacccattgtacatcctcgtcacatttttcacaatacaaattgcaactgttattaaataagcatttgtgtatgtatttatttaatgtgcatctcctccactaccctgtagactccggagggcagaggctggaaccatctcattcactgcttgagcattcctagccctctttctggctcactataggtgcttaagcagaatttgttgaaaaagtggatggttggatgaagggcaggtccttgtgaattaaagagagcctgggcatgaagaggagtgaaggtcctagggtatcctgctagggcaacaggacctgtgaactcgttctgctatgactgcaacatttatttaaggacaaaattctcccctgatgtcttcatttcttattgcttttcaggagataaatgtgcatgaacttctctgaggaacaactacctcataataataatagccaccatttattgagcacatacttttaccatgctgaggactttacatgcattaattaaaacaactcatatttactgagtactaactaatgtgacagatgctgttctaagcgctttccaagccataactcattcattaatcacaaactactctataaggtagataatatttttgtccccatttacagttgaataaaccgaggcccagaagggttaagtaacttgcctaaacatatcctactgcttttccaatattgcattatctcatttaatccttacaaaaaatccatgaggtgccattatcccccttagacttacggggaaattgaagcttagagagggtaagtactcagtagaggagctagaatttgaacccaggtgtctgtcattccaaagtctgcattcttaactatgaagttatgactctgcccttttgggatctgcatgatatgttgacagttgctaagaacaagggtaaaagacccttgcagatctggagtgatctgcatctctctttataaagaaaaaaacccctctttttctttataaattacacagtctctggtatgtctttattagtggcgtgagaacaaaatgagccatcctgggacagaatgagcagagtttcatgagcaggtggttcctcatttgccttgcctgtttgaagagcagggttggcttctgagagtggcattgtcacatacctctctgaggagatgaacctactggtcccgagttgctttacataaaaattccaaacaatgcaacttttagaattggttctatgtttcaatgactttgtgtaggacttttaggtctgggagaatcccagagacaatttcctcagtccatgactaaatcctttctgcatcttcctcctcagataataattaagcctgcctggatacctatgataatggggagctcagtacccaattccctagtccataatagttattttcattaatagtaacaaatatgtattaacaactcactgttaaatgctatgttagcacctggcatttaatcctcaaaataacctcctgtatattatccccgttttgcagagtaagcagttgaaatttgtgagatggtcgcatgcttaaaaacatgcagttcatactcttcatctttgtactgcagagcctaggtatttatatgtctacttttgagggtttccttgactaattgttttttgctttcttcttaactgctcattagcacttcattctgggaacgataactcacacaggctatgattgtctgaggctggttttcataagagctaatgtctagtgcattgattatgtgccaggcattgtgattggtatgtttcatttactctcttccttaatcctatgacactcgtagaggcaggtgcgatcagttccccactttataaatgagggaactgaggcacagaagatgaatatatttataccaagttattcacactgataagtgatggagctgtcatttggacccacagactgaccctgaagcacaggcttctcaccattgggccttcctgccttcttcaggactggaaagattaatatttttgtgcaaggctagcaagcaggtttcaaactccctccacattttcattctgaaagtcagtcattattctggtgttagccctgccttttctccaggaagtttatgtatcctttagatgttttcttttgatctttaaaagcagttggttttctgcttataaagatattatttgttcattgtaaaaattcaaataatacaaataaacaacaaaaggaagaaaaaaatcacctgaaatcttaccacccagaaagagccacagtgcaccaacaatttggtgacattcattctagccttctccctgtgcaatgcttgcacagaaattgcatacacagacaagcttatggacagaaagccttttgttcactgaacaacctggagaaagttacacattatggtgtacagatcacactgtccttttaagtaggctaacatgaatttgtctagttatacaattatctatttaaatagtatttttgtggatatttaggttgtttctaaatatttggtattatttaaaagtctataaataaacatttttatgtaaatcttggagctcttgtctaattatcttcttgaaataaatgcctagaagaagaattagtgagtcaaagtagctgtgcattttagatttcgttgatactaccatgttaccactcatccttctatgaagttctactaacgtgcaactctgccattactgcatgagaaggtctttcaccagaacctctttgttactgtgcctggtcaatttatgatgattgtttttaatcattgccaataaagtagaaaagaaattgtatctcattattctcgatatggaatttatatgagtggacattttttcacatgtttattggttttacacaacgtttgatacaaataaaggctgaaaagttgaaaatgaaaatttgaatagtcaaacgaatgtggaaactctcgtatttttagacagagcctaggaagtttaggaaatacaaaattttctcttgacaaaaatattttgtgtcggaactctcctgcccttgatgtccaccatgacccttgcacagacacatcgtggggaatacacctggctaaaagcaccctctggaggcccttaagtcttatgggctcccaattgtccattaattcacatttccctaggcattggtggttagggctaaattaatatcctggcccaggatccagaatcgttccccacaggtggtcacagctgccctacggctggaattattactgatctttgcaacactttattctgtcctcccttgattattgactttagtgaacatgaaccaactgtttatgttccatctatgcctttggcccacagcaaatggtcctcatggaatcagtgtccattcagtagatacagaaacattggacaatatctctgtaggttgcaaactgtaggctttctctggaattcctgcccagtcctcttttctcagtatctttaggccatacagtgaggggttaagtgcataggcttttgcttaagatctacgtagatgagactcttccactttctgactattgacttggaacaagtgacttgatctttgtaaaaccgcctaaactggttgtgagaattaaatgaaataatctatatgaaatggtcaggatagtcagtgttcactcttcagatagaacccagctggtagccatgagacacttgtgaatttgtctttgtccctcctctttcccttgggatagtaaactgtaggtgcattcatgggaaggaatgtacaaagatggcattcctttgtgcaagaagtcctatctccctgccgtctctgtactttgtgtctttagcattgtgcttgtctctctatattgtgatgatctgctgacttctagcctcttcaactagactctaagctccttgagagacatgtggtaatggtctactctgagtccttacccctccgcttgacacagagagggtcttatataaactcttgtaaaacaaatgaatataatcctgtattatctaatttgccttagcttctaagacatggaatagttggatagttgcatggaataaatatttgcataactaattaagagtgaaggaattaattcacttccaacattttttttcctttcaaagatttattatcagtaggtctcatgtctgttttctagtctactatgctttctctatttacggcagctttaatttggttaaactttatttagattctgttgtgaggtgggcactgtaataaatactgtggagattccaaggaggaaaaagacctgatccctattgtagcactaagaaaggaccttgtaatgccaacctcatatggaatctgttcctaagaattgctacaaaacgttgtacagggtaggggaagacttagaggaaggtatctgattcatttcatgcatccaaattctgccttacataacagggtgctttacgtgttaactggggttcagactatcctttacgccaggagtcagcaagttttttctttaaagggccagatagtaaatatttccatctttgctggccacacagtttctgttgcaaccattcagatctgccattgtggcaagaaataagtcatagacaatatgtaaacaaatggctctggttgtgttccaataaaactttatttataaaatatgcaactgaatggatttggcctgggagccatagtttgacaacctccgctttaggcactgggaagtcattggtggtttttgagcaggaggctcttgattaggttgtttttcagaggaggctttgtttgctgacacattgccgtgtcccttctctgaacttagtaataataacctttactgtttacaccacactttacaacttataaagcattttcaaatcccatgtaatccccactagggaggctgggaagcattatccctgttttaaagaagacgaattcaatccagaaggactcgatgacttgtcctaagtcacagaggtagactggaaccctgtcttcctgctgccagcctcggggctctggtggagaccccgactcttcctccatttagctggccagacatctaattactttatgtgttagtcctgtttcctcagttacaggatgcatttctaaagtgtagggatatgtcttccactctttttctatcctccaaagtcctaagcacagtgctgagtctttaaggagccatttactgttgatcattcacctctgggccttgtggttcaaagtttgttttccttccatttgtcttcagttaattgcttggtcaaatctgttggtaagggttattccatactcatctgaaatcaaagggttaatgcttgtggtccaagtatccacttatctttccaatttgaaatttggaaagctaattttccaaattatatattccaaaaatatacccctttccggcagctttctcagtaaggaaaagggtatattttgggggtctgcctaaatctacattctgttgtaagtggtcaaagaaacaaagggaattgactttctttatagcacatgggttgacttgaggaaaaaattgggcaccaaaaggtgaggttaagatccagacttatatatttgggaccctgaaagatgttggatatgtgctgattgtgaaatcttgttctcatctttctatataccatgtttgacttttttgcacaaattctggtattcacacccaggtctccatcatctctcacctgtatcactgtgagtgtccccctctcttgtcctctttaccatctgtcctccacacagcagccacagtaatcttgataatatttaatcagatcacatcaggcccctctttgaaaccctgcaaaggtgtcccactacatttaaattaaaatccaaactagttccataactttcagggccacaaccttgaacacaagccacaaccctatgtcatctggcccctgtctaccttccttgtcccatctcatctcatgccactttcccccttttctgtgacatggtccctggccctgaacatgctagattcattctcatcatctggctttcaaatctgctattccttttgttaggactcctctttccccagatccttccaagcctgttatctccaggagacactccctgaccccctctccccttccgtgtccctctgtgcagcaaaaccctgtcctattagcttatttgtgtattatctgtctctgctcccatttattgaagaactttagtatttgttgaatgaatgaatagagtaaattcttatagttagaggcttcaaggaatcatacaaccttagaaatagaacagagaagtttaaaactttagatcttgggtagaatcttatttaacgattttcaaaattcccttagcagtaaaatcagctttccaaatccaagcttaagcacaattccaatatctaaaacagaataaagtggagttgttctagaaaatgtaggggactcagtcctgggactcaaagcaaacctaaaaaccacgaagacaacccccctcattatagagatggggaaactaagactctgagcagctgtcttctacctgcaagtgcttcaaaaagaacaaagtcagccgggcacggtggttcacacccataatcccagcactttgggaggtcaaggcaggtggatcacaaggtcaggagttcaagaccagcttggaccagcttgggcaacatagtgaaaccacatctctactaaaaatacaaaaaaattctctgagtgtggtggcaggcacctgtaatcccagctacttggcaggctgaggcaaagagaatcgcttgaacctgggaggcggaggttgcagtgagccgagattgtgccattgcactccagcctgggcaacagtgcgagattccgtcccaaaaaaaaaaaaaaaaagaaaaagaaaaaagaaaagaaaaacaacaacaaccactacaacaaactttagaccttggggagaatcttatttaatgattttcaaaattcctttagcggtaaaatcagccttccaaatccaagcttaagcacaattccaatatctaaaacacaataaagtggagttgttctagaaaatgtaggggactcagtcctgggactcaaagcaaacctaaaaaccatgaagacaacccccctcattatagagatggggaaactgagactctgagcagctgtcttctacctgcaaatgcttcaagaagaacaaacttgctggtgtgtatcccctacacccgcacagcttctagcatggagcaggagctaggtgaacatttgtggaactgcacaagtgacacattgagttgaaggcagaagtggaactaatgtcaatccaggttctcctcttctccagtacaccagtgagaaaggttgagggccatggcccacctggttccagctcaggtgcctcatttggaaacagacctagtggagaagacaggctttctgatcccagaggcctctccgatggatgggcaagccactaatgctatttttttctaccactccaaccctctaattgcatttgtcacagacacccagggagatatgactaccatctacctctacctcctcttcatttttatcctttcttctaccttatctttcttttttcaaaaacataataaaatgtttcaggtgtgcaagacagcacagaggacagtagagtgaacataacaaacatgaccagcctaagacatgaaaggttacaaatctagctggattatcctctggatttcctctctcctttctcttttattgtgtttccctctgtcttcactccttcttttccccttcttctcttctgttttctccagcatggctccccatttcatttctcccctctcctccctgctctttgtctcaccacctttcttgccctcctcttttccacaccctgcccttcctcttccttcatttcttttgttcctctctagccccttctcttgccttctccttctctcttgcatcttcataaatgttttagggtcagtgattcattcctttggctattctatgtcaagggtggggaatcagcatctcttgaatttcctcttttgcaagcctcagggcacctgccctgtagggacaattctgtggtacattcacccctctagccagaggcattggctgctgctgctgctgctgctgaatctgaaaggtcacctccagcttgctttctccaggggaaagcctttactaccaccagatgcaactgctggccaattcatccagcttctcatagaagaaagggcattggcttaatattatctctgtatttctcagcattttgatttctctccagagatttttctgatatttttcaatccatttgtttttcactacataactggggacattttcttacccttttttttttttttaggtcataccactttttgactttaaataatttgatttatttttcctggggtcaaacactgggggagctgcctgctcaaacagatagaagaatctagaatctttttgatttgttgtcagaggaatagctctgtgtgtcagatggaagggagagagcagaagtgggtggtcatgtttcacccctcttctccataagctccatccagaaaaaaacaacaggaagccagacagacaatgatttgcattgctgtgaacagatttactcatagggtacagagttggcacaggccacttctaagttatttttcaatgttgacgtgtcaacattttccacatgggagagggatccagttggaatggaagaaggcaggaaaatcgttttccatctcagcatcactttctgtggttttgtggtacttggaaactctgtttacacttgacaatctcttcctgtagattgtctaaagaaattatgaataaaattggaaaagtctttccattctgaagggacctatgctccagtatagaccagtcacacacatttggctgattaaaatactagtcgttgtactaaaaacgacagactccagtgaccccttgcttgtcaatagcactgccaaagttttcaaagcatttttagatttactagcccttttccacctcacaacaagttttgccaagactaggcattatcactcccattttgcagatgagggaactggtagagaggtgcgagatttgcccaagatgaaggtggtctggcaggaccaaaaggacagcagaaatttcattagatcagagagcttctaatggaggccagaagaagctgggtgcctcttagaggtgccttgggtgggggctggcaggattggcccacagcatgacttggaagtacccccttctcctgacatagatacacattgcacacccaccaaggacaactgttgggccctggactctgcagtgcgccatccaccctggtacagcaaagcattggcaggcagctgcaatgaaggttttcccacttctggatccctgcctacactgaagaattttcacaaggggaagagaaggggggaagtttatggtctgatctaatcacagatgaacagagaactcggtggcacaagcagtttgcaaaagcgcatgactgcagtgccattaaagagcccactcttcatttctgagatgagtaaacagcgtgcccagcagcatgtgcaacacacagtaggtgctcagtaaatggtgacttccactgttcttatctttaccatggttaccattatgcactgggccccaggttacacagagacgggacaaaatcccaggttttgagagtccatgcgggggttgtggcaaatctcaagtaacattaaaaggcagaagtaataaaaacgaaactcaaggagaaaatgctgccaaatgtcccgtctgctggttttggtgttgtggccccccgtgaggtctgccatttcttaaggggccaagaacatctctgtggctttttgtcattcatttcctcctctcgtgcaggaatctcagaccattgctggaatcgatgttgcattctgggacttaggctctctgcctgtacaagctgtgaagccccatccacctcccatgcaaatcacaggctgtgtagcacacctttaattgcctctcacctgatgggctcacggtgtttgcctaatgacaaaggatatcctttttctcatggatgctggtcaaatccagaagtataaaagctcaagtttaaatgtcccccttccttctttctcctttcctcccttcctttctctccctcctccttccctctcttgtttcttgcaaagggaagagcatatggtagagagaaccacccagcctcaaccccacttctcactctccaggataggagactaggaaaggcactgagctgggtggagaactttcctggagatccggggacagggggtggtctcactcctaaccacctatactcacctgagtcttctcccctgcccctagagaaaagcagccagcagccagcattcacgcatcctcttcttttgggggtaggatcacactccctaaagctccttcggtgccccatgctttcaccctgactccagccactgggggttccaccttccctccacgttacctattgtaaccacagcccccgagagcagggtgacattccatctcctggaatgaaatacttatcatgacttggcaaagcctttctcttacaaagagttattcatgcacttacacctaaacttgctgaatgacctaggacaagtcatctcatatctgggttctcagtttcctcatttgaaaatgaaaggagcatttggctcacataacgcagtgcctggcacataatagatatagtaagaatcagccagcagacctcttggcttccaaccttccttccttcttccctattttctggcctggagatgtccccgattaccactacccttgtcttgcctgaacagggacctttatgtgaatgctatgatctcaagcctggccttggccaccctccatgatcctttctgggccaacgaccaggacagcctttctgtttcccagtcccatgtctgagcctgattggctgcactggggcacagggattggaaggagctcccagagcgtgcaggcagatggtgaaagagccagaaaccgttgctcctggggtcggggggcggggaggcagtcagcagtgagcaacttcttaaagctcacatcaacattccccattctggatgagatccagaatcttatgggttcagagtttatctgaagtaccgggaccccttaaatcccatgtggagtggctgggggtggtctgataatttaggtagtgtggcatggtggacaagagcttgcattctgaaaacagacggcttagatttcaatgctggctctgccattttctgcatctttgttggagggtaaattacttaacctctctgggctatgattttctcatctgtaatatgtggctaataatattacttaagaagctgtagctaataatattacttaagaagctggctgtaagatttaaacgaggtgacacactcataaatctttcagaaaagcgcctgtcaggctggaaccacttaataaactttggctcctattatgattactagcattattactataggcagtatcatcattattattatcaaagtgtgagaaccagcaaagatttctatcactcactagttgccactcaaactctcatctgtgtgaagcaggaatatttatgatatagtccctacccgctgctcacagtgggtgtgggagtcgattgataatgtagaagaggataaatgtttataataaaatgcagatgccatagaactaaaagcaattagtagatgacagaagatgagaggtaaaaaataaagttaataaagaggagaaaaactgagcatcaactttgacgtgagcttcctagtaaaccaaggcagaaagggaatatagtaagacatatttttgtcattacttagtgcttagtgctagacatttcatcatgagtaacaaccttcttttgtagccttgaactctaagagaaaattatcataagaatatttattatgaatttatttacacatctaaaattttaggctttctctatgagaaagagaatccttatgagatttggaaagtatcacaataaaaatggttgaagaaatgtgagctctttttttttgagacagagtcttgctctgccaccaggctggagtgcattggcatgatctcggctcactgcaccttccacctcctgggttcaagcaattctcgtgcctcagcctcccaagtagctgggattacaggcacacaccaccacacccagctaaccatttttgtatttttttaagtagagacaggatttcaccatgttggaagggatggtctcgatctcctaaccacatgatcctcctgcctcttcctcccaaagtgctaggattacaagtgtgagccaccgtactcggccaggaatgtgagctctttaaccaagagaagagcaaacggaaagacatgatggtccctttaaagacttcactactgtatcaagtgggaagtagggttgccctgtaatatttccagagacagaaccacagccccatggttgagagcctggggatgcaaactgagtttcagctaaagacagaagttccctcaaactcaagtaatgcaactctgccttgtgacggggtgagctccctgtccatgcaagcatttgtctagaaggccatcgtcagggccacatggggaagctctcactgcattcttagagagcaaagagatgattccttcatcccaggatactttaattttctccaggtctatgtaatagaggagtggactctcaaaagaagagctgagctttcctcccttgaacgcagatgaacaactctaataaaaaccatttcctacaaagctgctcccctagaaataaaggagcaggctagctagagcaatcaaatcactttttaaaatgattctttaagatgaagagtattaggaaataattcggctgagcaattgtgagtggatttggggagagagtcccctgtcagaagtgactctgtcacctgccaccaaccttcttgtgtgttgttcttcctttgtgtgtcccagctttcatcagtacgttctgagcttctggggctgactgaggctgcatgaacaagtatgtgtccctggggctcccacagctctaccccagctctcctctgcccatcaactggctgccatggtctcctttctcatgggggctccgcttgggaagggccatatattgctcagcaccatgtgattggtgcctgcacagtgttgggcccacagcagccaggtgtactgtatggttaggagcataggttctagagccaggctgcctgggtttaaaatccagctgtctcatttactagctctgtgaccttggtcaggatgtttcaactctttgagcctcagttttcttatctgtaacatgggattgataggagtatcctctacatgcacacacacacacaaaacaacaacaacaacaacaacaacaacaacacacaccggattgcagtatgagttcaatgaaagaatgacagttaagctcttaacatagtgtctatcttatctactatatcaggggtcaaaaaactctttcaatcaagggttagacagtaaatatttgcagctgtgtaggccatgtggtcttttttcaagtactcaactctaccgttgtagcctgaaagcacacatgggcaatatgtaaatgaacaagcatagtgatattccaattaaactgaatttacccaaacaggtagcaggcaagatttggcccgtggacggtagtttgctgccgttgtgtaaagcagcaagtcagagaaccagatggaaatgagcaaccacagagactaaagtgaagaagcaaaaggtggtagaatggtggattcaacagcagcatccagaagttaagaactcagtctgtgaagtagaacaggtctggtttcaaacctggctggtgaatggtgtttgctctctgagacttggcttcctaatacataaagtgcaagatggcaagtaaaagggacctttctcaaatggctgatttgtggattagaagagatattagacatggtgccaggcatctagtaagagctcaaaaaatgttagcaaagaggagaatgatgacaaggtggctgctgaagtgaactaaactgaattgaaccacagcctccttttgccttcagcacgcccagacagtatggctcattaggaagagcaagagtcttagatcctcagagtgcctgacttcctgccttgagacttctctcactctctgtaaagtgcagccaattcatattctttctccatgccaagaatcaggttcaatgagaccctggagggagagcctgcctaccacctacctataaataggatggcaagtcagcaccagcatcaatgattgcaggtcaaaaatgagccttggtttctcagtcttgcttgcctcaaatggacttgaggatagaagggccaaaagatcaataatggagaatataaatgtttgtgcagagctgcttgggcactcaggtttggagcaggactaggaaggccctgggctttgaattgcttttgttcgatgttagtgtcctggaaatagacctctctacataccacgttttgttgggagatggtattgccatccaaagtgagactttcaatgttcctttccattccttgttggcatacaaagactgcataacacatgaatttccccaatgtgttcacagtgttgtgccttttgttgactccataagtttttattcttactttctttactctcagattttccagaaaaaaattaagcagactcttacagccctaattaatgctatcaggcatctgccctaatcatgtattacttgatactgattttcagttatgtcatttccttccactaagatcatgagagtctcacaaactgtccattgtattcacttcagggtctccagcactcgaaaccacaagctgtcttttctcttctttcctccttccctctctccatttagcctttcttcctttccttctactaagcacccactatgtgccaaacattgtgctgggcatcaggaacacctccaagctctcagatctaaaggaggagatgggcaggtaataggcagcacggtaagacgcaagctttaagcaaggtcaggtattgtagaaatccaccatcccaggccctaacctgttgggacctttagacaaccctaacctgttgtcccctgatggaggggacatctgagccaggctttctatgatgactaggagttcaagtcattgaaagaaggaagaagcaggttcaaaggtgtgccttgagtctagacgtgaaatggaagtttttccttccacataaacttaattatcgtggctgggcgagatagtggcaaatgtcaggagaagactggctggcaggaggcatggcatgaaggaccttattggccaaacagatcttctggagtgatttcaacatcttaaagcttaggcaagctgtacatttacaaagcaaacctaaatgtcgagtctctctcctttgggctgtaatattaagagtattgactccttcatgcactacttctaattagaagcttcgattagcagtattacatgctttggatgaacaaaatgataaaataagctaattatgacttaatgtgtagagttgttgcccactatctttcaatacaccaagtcagtggggagagggagagccgcaaagaagctcttggtggtggaaaaactgaaaaatatttcctcctattaccaagatacagatatagcctgcctggaattgactgtaagtaaagtgataaaacccagcaaatcatcgattaggagttcaccatatatctagaactgtcttcaccttgagatacaactggtgtaccaaacagccaaggtcctgtctattttggaacttagttacgggtaggaaaggctgatattaagtgaacaaacatccaagtaaacatggatttataaaacgtgctagatgttgtgaccaaaaaatagaggccggtgggagaatcatgagtcctaattgacattgtgggtaagggaagtgccttatgaagaagtgatgtttgcattgaggagggatggtgggtgtgattgaggtgatgggatgggcatgaaaagagggtgtccaggcaaacgaacattgtgcacactggctctgatgcaagaaaggtatttggcctttgtaacagctaaaggaaaggccagcttggatggaatccagagagcaggccacagttggtcttgaagagttaggcaggagtgatgatattggtcctgaaggccacattaagtcttttggttgatttttgaaaacagaatgacttcaagaggtttacgaagggtgtgtgtgtgtgtgggcatgcatgcgtgcatgtgtgtgtaggagagaggtatattaacacgtttgcattttaaaatgatttttctggtttttctgagaaaatggactggatggggcaaaagtggaagcaggatgaaccagtggggaggctgtaacagtcgtccaggtaacacatgatgatggcaaggtggtaacagtaagatgatgagaactggataaactcaaaaacactgagtattacattagttagagttgaagtgtgaggcggaaagatgtagagaaaggaaattaatttgatttgagtggatttgacttagaaggcaacattttgagacacctagaatgatggcttctaataggctttcccagagccaaatggaggggttttctggaccctcagccatgtgctatggtgttaccaccatgtttgcttgcatctgttggagaagaagctaccccttcctctgcatggtggccgccttgcaagaacacatggctctggggaccacagtgccctctcctaccctcaagtttggagcatgagtggtgtacaccataccatatcaggcattggccttcagaagtaagagaccacccagatgcccaatcagtcaaacggtttgtttctccctctctgtgtgccaaggaaaccacagaaaccaaaaacacaaatgaggctgcatcttgatctgtagggttaatgccatctatcagaaataccacaaaaacactgaaaaggtcaaggaaagtccaggaggggaataaccagttagtctagtcgtgtttaactcccctacaaaagagctgatgaactgctgagaaaagctgtcacaggagcaaagaggcacaatgataaccagcatcacttggtggtgactgtggacgaggccatctttttaaggctgtgctattttatatgatcctcatgttcccagtgagccccattttagaaagctgaggcacaaagaagtttagtgattttgccaagccaccacagtagtgaatagtccagcagggccttgtgctccaggggtcatgctcttatccactacgtgattctgtagcaagaggccacaggctattaaggtcaagtagagtggtttctggaagggacagccttgacctgggttgagaaaagtgggaaatactgagggtcagctgttttgtagactgcaccccgctgaggctccctggggccatttgggaagctgggttcctggcatgatgctgagtgttccacagagagggaagcctcattcctgactgtattttttcctcaaatccttctgagcacccttaatctgcagaaaatgggttgggtactagggacacggcagtgagctcagacattctcccagagcccacagagtagtgagggagacataaaagaaaggggtgaggccaggcgtggtggctcacgcctgtaatcccaacagtttgggaggccgaggcaggcggatcacaaggtcaagagatcgagaccatcttggccaacatggtgaaaccctgtctctactaaaaatacaaaaattagctgggtgtggtggcacatgcctgtagtcccagctactcgggaggctgaggcaggagaatcgcttgaacaaaggaggtggaggttgcagtgagctgagatcacgccactgtactccagcctggcgacagagcaagactccatctcaaaaaaaaaagaaagaaaggggtgaatttcaatgtaaggtggtcatggtgcatatctgtagtctcagctactggggaagctgaggtgggaggatcttttcagcccaggaatttgaggctacagtgagctatgatcgcacctattaatagccagtgcactccagcctgagcaacacagtgagatccccatctctaaaaaacaacaacaacaacaataaaaaaaaaaaaaaaaaaggaaaaggaaaaagttaagagcagggtggtaaatacccaccaagaggaagtcggggtgccgcaggagtcccttggagcagcatgcatccctgatatgtttctgtggtggtgtgagtgtgaaggctggtggctaagggagcctcctcaagggcagggttgtctattgtgagcttggaagagagtaggagccagcgggggccggggggcagggggcgttcgggtgggcacaagtggggagatgggagaagggaagtcacttcaggacacagtaggtacaaaggcctccaagtatggagataagaggaagcagggctcttttgtggaactgatagaagttcagacttcctagagggtcgaacttactcggggcagggggagaaaagaagtaagtttggagaaaggtgggtgagagctcggtcactgtagcaggaagtttggacttaaccctaagagcagtggaagcctccagtgggttttaggggaggagaaactgggcggagtggctcatgcctgtaatcccagcactttgggaggccgaggcaggtgaatcacctgaggtcaggagttcgagaccagcctggccaacatggcgaagctctgcctctacaaaaaatacaaaaattagctgggcgtggtcctgtaatcccagttactcgggagggctgaggcatgagaattgcttgagcctgggaggcagaggttgcagtgagccgagatcgttccattgactccagcctgggcaacagagcaagacttcgtctcaaaaaaaaaaaaaaaaaaaaagtttaggggaggagaaggtaagacattttctggggctgcctagatcctttgtactttcttgggtaaaagcagcatactgacctagcctttggcaagaagcctgatgatttggttcccaagagacagtactgcttggcttcaagcaagtacttgaaagcaaggagggctttcccctcagtcttaatgctagttgtcccttcctttttcttgcaacgctgggcttgctgagtagctgagatgtgttgtattttttaaagagcaacttgttctctctaaatcacctacctgtctatggaatttctaccagtgtgttcaaacacctctccaaagtctcacttctgggcagcttccctttaatgggggtggtggggaagggtgcagacaggcaggggagggcctgagggagtgaggtgggaaggggttggcagagagctcaggcctttagagtgctggcgacctcagcagcaccatcatctcattctctctcattcacatggaggccttccaaccagcctctccccctagtgagggccccgcagtcctttaagaaggcttcccatcatttaaacagacaataagtctgacagataccgagggtggcctcagctcagcgagcattaactgtattagctacattggaatttccatcagtgacactgtatggagctaatttgtgggtttgctaatccccaagtcactcctagtagcaacacatttctgtgtgggagggcctgcccagaagactatggcaccttcactgctccacggctggagcagctcagtgtgagggaagaaaccggctctggaacccgagagacccgggtttgaatcccagctctgccactccctagctgtgtgaccttgactaagcaactgaacctccctgagcctcagtcactcatatgaaaatgaagatagtagtcatgacactctcatggggctgaggtcaggattcagggaggccgtgcagagtgctcagtaaatatgaggtgctggcatgtattttctacagtgggtttaggaagggttgcaaactcacatggcttcagggtgacacaagtgggtgaagccagctgggagcaagctaggcagagagaaatgtgccacaaaggggacccctgctgtcagctgcagccccagttggtgaatgaaacccaggagcagtactgttagagccagtgttttttttttttttcaggagaagccagaactctgtgttaaatatcccaacttttaaatgttggagactgaattaagcttttaaaatcatctgggggcaaaccaaacacatctgaaagccagctgccccttggcaacctcttgctttttctttctgcaagaagtggtttaaaattgggtcctcagtataaatagctcgaggctgccaggcagagtatgttgggagaggacagtttgtggcaaaataatttaatgcccccacctctctgagggtaatgtcactcgctcttcaagtcctgtatacgggcttgaatgatgtccagaatggaactgaaatagagagggatgggtgtggggtaggcagggactggacaaaccatccaggctgtgtgctgtcatacagcacctctgggaggggccactaaatggcagcgtctgcacccaggaactgcaaaccacccaggtgtgcagggctcaccacagctgcgattggtcctctgtcctttttggacttgaacaaagtgagaacactttggggcagatgtagcagccaggaagatttactttctgacaagaggatgtctaaacattcattcacagtcaagctgatttcctaaaaacagctgtcttgaacctgactgtatctaaaatgtctgttgccttcgttcagaaagcctctattctactttacccatcaacattttctcttacacaaggtttaatatctcagcaggtgttgactggttggaagtagatggggtactaattataaatgaatgcaaagacatttttcttacactaagagttaccaaacggtcctgagttcgaccttctttacattcattcgtgcagtaaatcctcaatgagcgattactacatgccaggcattgtgcccggggccgtggatagtcagaaagttctttctgacgtcaaacgcaagctttactgtcagctaagagagcctcagtttcctcatatgtaaaatgagtatgatcatagtactgactactgattatttcaaaggctcccaagccagtgtgtgcacatggccagcattcaataagcattagccagcaaacgggcgttcatctcaattaaaaccaccatcatttgggcttggtactgttatccccacttctaacataggagcaaactgagatttttagatttttaaaatttattttattttgttacgttatgttatgttatttcattttatttgtagagacagggtctccctatgtttcccaggctggtcttaagttcctgggttcaagctatcctcctgccttagcctcccaaagtgctggggttacgggtatgagccacccatgcctggccaaaactgagttttgctgtgacaaattaccttgatgaaagtcacatacctgagctggagctgggattgaccagtcatctaagcccattatctttctgccaaatcacagggaagaccattcctgacctccttgctttactgtcagaaagaattgaagggtggttctggtttaagctctggaaagtctatagggaaattagggcctgaagtagaaagactgctagccgcctctgtcctgctggaaatgtgcatgaggctggtgctgatggtgctgagaaagcaaatgctgtctagagggaaatactatcattcaataaatatttattgagttctgctatgagtcaggcactgtcctagggactgggactacagcagtgaacagagcagggtccctgctctcactgagcttatggtctgtcacaatcctgtaggtgaaaagatgccaaacataaatatgaggttttaggaacgccagttgaaatcaatcgaaagatatggccggggatgcatctgggacccatatctgatggctgctgaggcattttggtcaccagtgaaatattttctgcttattggcaggcaacttgattttgcatttggtttgcgtcattcttagggatactgaagatacagcgatgtgcccaagtcagatgaacacgcccaattttaggagaagattctgctttcatctggaggcagtaaccatgtatttctagaagggagctcttggaaagatcctctggccagttctagtctagttcctgtttactctctgctgggtttaagtggctgataattgggctcctgcagagaagcagctaaaatctgtggcttgtttgcttggaacattttagaaagtcaaagtagttaatgataatggtaaccaccacttagcgaagactagttgccagtcatagtggcagaggctttacaggcattatctaattgaatcctcacaaacaacccagtatgttggaaagttcaattacctctgttctacacacaagaaaattaaggctcagagaggtcaaattcttgctcaagatcacacagctggaaaatggcagagggggaaatgaaccaggcctgactttctctagagcagtggttttcaactaggggtgactttgcccccactctgcaaccttacagggacatttggaaaagtctggagacatttttgtttgccacaactgggagggggtgctactggcatctagtgggtagagggcagggatgctctaaacatcctacaacacacaggaaccgttggccagtccgtgtcggtaaacatctcttgtgcaggcacttcttgccaaaacattttgcattttgtacaatattcccagtctccactgaagtgttgtctttatctcctctcttgctctgccttcatctagaagctgtgatggaacaatttagatcaagccatccccaggaaaagctttcattgaacaacagagcaagggaaagcccaatgtattctgcagccccatttcagttaaggttcaagttcactaatgccagaaaggaattcattaatgccttacaggctgcaggacaaatgttaatagcttcacctttaatttaagctcagttttatttttatagctggtcccttggtggcaactagatttattgggacattttgaacagctgaggcaaatcaataaagtatataagcacatgcgattcttgtgttatttgcaaatataattctgattactcacatgcatataggcatactcatacatgctctaagaatatgctttcccctgctccatgttttaaaactaatccccaaatcatgacatttggtcttctgaatatggcccccaagttatgagatgggcaaggattggaatgaatagagaaatgaacacaaataggttcccacctgctagaggaaaataaatccttaaagcatatgggtcctggacgtttttgtctatctataaatgccaagcaacatattgcaatatggaatcatgaccaatgttgcaaaactaaggatacagtgaactatgtttgtagttgttcttcattttacaggtttcaatgcatttttctcttttcttttttctttttttttttttttttttgagaccgagtctcactctgtcgcccaggatagagtgcagtggtgtgatgtcagctcactgcaacctctgcctcccaggttcaagcaattctcctgcctcagcctcctgagtaactgggactacaggcccccactacattattgcatttcaccttcaaaacaaccctgaggcattagccccattttgcagatgagaaaacaggttcagaaaaattaggaattatgtccaaggtcacagaacttgcctctggcagagagagccactgtctggtgctatttctgtcataattgtcagcccctagagtgaatgtgagcgaggctgagccaggctgcctgctttcagtagctgctgctgatgtgaggagagtctgtggatgatttcatcacctttgctgtgcctccatttctaaagccttcattctttatctatcagggctcagctatgatgtgctgtccagtatgggaaccttgtaccacatgaagctatctaaatttaaattaattaaaattttagttcctgggtcacattagctgcatttcaagtgctaatagcccagtgttgctggtggctaccatgttcaacagtatagaacatttctttctattcagtagcactggatcagagtgattaaggaaatgaaatcagtgggacatagaatatttcagaaagatgctatccaatttgcaatgaatttaaaaaaatctaagttttttctttttgaagaagaaagtctaaatatttggttttggattcacactccatcaggtaccagagtgggaatatttccctgtgcttatctttatgtcagtcctgcaaggtgagtattattatctgcaaaatgtttcttttggattaagaaacaggtttagttacttgaccaacatacatatcttctaagttgcagagcaagaattcaaactcaaatctgccctctaaacctataatacatctactttactctgcactgtgagtcctcaacaaacagaattttggttctatcccaaagccagtgtcactgtgaataaaatacaatccaagatgatcacttacaaggattattatcatccagatttggaacttctagaatggtctgagtagataaacagtgggaaaatcacctgagacatactttatggtgaatatcactgagttgtttacttggggctaatcctctcttttcttctcagtcccacaattgacccttgtgcagcttgagccacaaaatgccactcaaattctgcaccagcattttttttaatgactctgcaagtcatcagggtgcctttctctcagccattggaacaaatttgccatgaggacacttaatgtttactctgaatggcaccaaagccaggcttatttccatgtctgtggcctggtgttagctgagccatatgttcctggcccagatggctctctcagttctagatgattagtaccgcagatccagatcccaagtctgtccatttgcaaagaagaggacagtcatcagacaggcctttcatgttagaagtggccatctgagacaaacaggacattgttccaagccggttaccaccgcatggaatatgtaaggaagatctcttttgagccctgtaattaggtaagcaaggtcactacaaagtcatttaaaattgcatctcaagacagttcgatggcagaggatctaccccctcagtgctgatttattgcttactctcttaactttttaaaaaaagatcagcagattgattgtgccgcctgtggttggaggcgtgcttaccttttctcaggcctgattcataaaacatgactgacctgttttcagcatcctttccctgtgtgcccagggagctcctccgaggttcactgcactaagtgtttggcactgagtgaaaacgatatgtcatgttcacagcagatgacccagcaggggccacggcaatgaagtccccaaaatgacctgttacatctctagctacaagactcagggaaacagagaggcagtttctaatggtctcctggaggaatttggactgatgactaaactttttaggtcacagctttcttgagaaatggcaggtgccccttctgcttctggtgaggtcagtcactggctccagcccccagtaggctctctccagcccacctagtcggtttctcctgcagggggttggttaaccatttgtcctcagaacactatcctcacaaggcacaatttctgagtccttcctatatctggggtatgagccacttggaagtgagaataataagtgaaaccctcaggtgcctccaaggccccaggaaaagcatttctacctttgctgatgctcgttggtccactagcaggcagctgttgttctggccactaaatctcagtgacatcagttcttttctaggtttatttcttcattaatgtttttattttattttattatttttcactgacaaaatggcccctagtcggccagttgatttaacaggtcaggtatgtgctgtgctttgaaacagaggataagaaaaaaaggatgatcattattagagtttcatgcctttctcagatccttattacgcctctgctgcattccacacacataccaatcgtgtatgaatttctgtttattagagaactctccttcacttctcttttcatgctatggcgttcacaggacatcagagccagtggagcttttagaacctagagctgttcccactacactgagctgtacataagattgccctccatgtccagactggggatgtttaatgtggccagtgacatttttccaagtctgtttattacctgctggtgagagttcctgagacagtttgagataaaactttaggagtaattatactttatgaggacataatacccttcaggcttcatttcacgtggtgctaaatcaatactcatattcaattcttttctgtctgccttcaagttaaaggccacaatattaaagtttcctataattagccaagaagttggtgctacagagatggtaaaaattgacttcaaaccctttatctgattgtgcaaaaccaacacaagacaggtggcatattgggtcaccaagttacatcagcaagttccacggaaagcctagatgccaggaaagaaaataaagggagggaagtgttttctaccaactgctgggaaaaataatgccccactgtcatcttcactaccagagtctcatggggctattaaatatctttctgttttcatttccatgatgtttcctaggttgaaattgttctctctagaatgattgcataagccaagatccctaacactagagggcatgggctaactgcgtacctatgcacatcaggctgttgaacaaccaaagcaccttgctctttgagacaatggcatccactgagccactcttggtgatacaagggaccctgggtataaaaaaaggaaagcgactattattttttcttctccttctttcttcttttgttttgtctttcagttataggccaggcttttatttatttattattttatttatttatttagaaaatggggtctcactgtgttgcccaggctgatgtcaaactcctgagcccaagccgttatttatgtttgatttacaagtgtattgggttccttggttgaagggtggctcttatttacatgccctttcttatcattgtctattggctttcaggattgttgctctacttgcgaagggtctttaatagtcttagccacacacaaattcatcttttggcacgtgtatgtgtgtgtgcacatatgtgttttcttagggtcttattgagacatcagcattctcccctgtcttaataactactccaatccataactttctttccacttaaaaccattacgttgtaaacagaattctttatgtgccactgtgtgtggtggagtgtatgtgtgtgtgtgtgtgtgtgagatgcaggtgggtacattcattcatgttgcattatacccataatgtatgaaggtagtaggaaaatggagtggtccagcttattgtccaatgccatgtagtttttggtaaagaaaggaggatcaaacatagcagggtggcagcagcaggagcagcagtataaccagagtgttgagattttttttttctaggaggtacttcttttttttttcaatcaactcatttgaatagattacttaattagcatttattgtttgtaaaattccttgtctagaagtaacattttagggtctgcagttttgaagaaagacaatttaatgggtgataattttgtatagaattttcaaattgatttcttggtagtaaattgttcctcaattgtagtgccttctccacactcattagacagcaagccttctttctaaatgcattcataaccattaaagtgttgtctctagtttcctgtcatttgaaacaggtcataacttcaggcacaaacatttaaaggacaactatactttcacaatttcattagtgttctagcggagtcggaatgtgctattgaagtttatagagctttgcagttcctgatggaaactattcggctctactcatcccaagagtagagataatctttctctttgtacagaaagttgtttcacttcaattccactctgcctgagttttatttatcagcctgatctatggctagaactatatagaagctccctagaacctgtttataattcacctcccctcctctttctccaaaaacaccctgggaatagaacaagctcattgccaaggaaactccctggcagtaaagtactgtttggtcctattttctactggcttctttgacttgttgggagatggtgtttaaatgcattactcaaaaggagctctagaaaatttgaaataaaacaaaaataaaaataaacatattgaaattccctgatatctgcagtggtttgtatgctcttggctttctgggagtatgcagcttatgagcagagctatttcacactttgttgtgaaattcagtggagaaagtgcagtcttaccacgccctctgcctggacattttctagccaaattaggtctacaaagtgatctaattggtctaaccctcttatttttgatcaatgaggaattagatgcttcgctattagaataacaactacaatgttgatcccatttaagaactttttgtatactgagcaagaagcttagaggacattatctcttttaatcctaaattccagttgccaagatgataaagaaaatgagattgtgtccatttctacagatgaagaaataggctcagaaaactcacgtgtcctgacccatatcacacagcagtttactaatagactttgatggacacccaaagatgtttactaaagatgccctttcaaatgaagcttttgactgaagaaaaaatatgcatgctctggtccctcagaacgccttttgtatagatattatacatcctgaagacaacccttcaaagcaaaccttggctccaacaaagctcctttcttctctttgacctaactctccccagttcccaaaatttgtggatttttcaacttgatgctctcctcatactatgttctaaaactcaattcaccttaccccattctttctgattctttcataacccatatagatattctcttcctaaacctttctttggttaatctcactgattccttcattcagaaaagaatacaatactaagtgcctactctgagccaggaactgctcttggggaatatccgtgaaccagaccaacaggctcctgttttatggggctttcagttttgggtggagggattgattattggagaactctgaacttggattcaaaagaccaaggctaaatcagaatgttaaaactggcagatatgggaaatggttatatctaatctggcctgcacagtgtcttaaaaattgaattcattggtagcattttaagatcaagagtttccacatagaaaacaacctggatttctggcatcttagtagtaacctgggcccacatccccatctaaggcatcaatccctgcaggaggagcagttctgtagccttctggtggggcagggtcttttagccacctttgcctcaaccatgccttctcatgcccagccagctacactcatgtacatgatctgttgacctctatagacacttttgcatcccatggagtaaatgatctacaaagtcccttcacagactgacataactgttgttgtctggcttcctgtgcattgctgtggcctcttcccacaggcagcgcctgcccagagctggcagccagacaaagagaatctgcctgaccccagaggaggctccatcattgcaaggcaaactcacagcacagtcagtccctggacagcgaccagctgtcttcaccccagagccacttagaatcaattctaggccttgatgttgaggccccactacttgaaaatttcaagagatttagcacaagtggataaaactaacaaaactagaaaatcagaagttgtctctggtggaagccaaacaaatcagaaatgaataaggagagaactttcgggtaaaagcaaataaaggctgtgtaatatttggaggaataatgctaattattaccagttttaaagttagtttttggtactttgaaaatctttactcaaaatcatcagcaaaagcaccagtaagcactaatattaattgcaggcttattgtgtttgtctatttcatttaacccactgctcccattttgctggtggaaaactgaaaaccaaagagattaagtcatttacccaaggtcatgtaactaatatattgaatctcagatgttttaatgattttgactcatttccaatttgcctggctatatagagaaaatatttgaggaattgacagggaacacacacacacacacacacacacacacacacacacacacacacagagggagggaggggagagagagagacagagacagacagagactgaacagattatttctccactgatgttcattatttagatctattttcaacatttaaaggcaattgtcagcatagtcaattcagccattttaaaccatcaagggccaatgagcaaagtgttttactgaagagtctacatatggaaatcaatgatatcccaaaactgagctggtacataaatctaagaaatgcaggtgtgagattgatgacttgggatttgatccccatagcaaatctgattaaatggtatacattggtttagaaaaacaatgtatcagggaaaatcctactcttaagaaacgttatgctgaattctgtaagatgataaaaaacatgtcacactagaccagaaatattacaaatgttctcagattctccctttctcattttctcatgtttagattagaagtatgggaactcagagggctgaatagaggattgccaggcagttaatgagaattcaaactagatttgaggtcttcctgattcccgggatttactctaccgggcagaagcagaagctgcttaaattctgaaaatagagtcttttaagagtgtgggattcatacggaacctcttctaaacaagttacctctgaaatgtgggacaaaataattctaggtgtgtttgtccaacaggagcctgtgacttgggatttgtgtctgcacatgcatggatctaaggaaccagccactttgacaggtggcctttcatcaggctcatcaatgtcttagtcaatttctggccctcctatcacccctgttctggagctgaagaaaccttgccatggggacaaatgcacttagagagtgagagcagcatagcaaagtgatgaaggggatggacgctagaattggaaccatggctctgccactgactagctattgggcaaccttcctgtgcctcccttatttataaagtggagacaatgatagtacctccttcataggatgaaacaagttaatatatttaaagtgcttagaagagtacctggcacatagtaggtattaggttagggattggtaacttttcaaaatatgagagactgtttttaataacaacagccagtattttggtccattttatgtgccaggcaccagtacaagaatttggcatatataagtcatttgattttcagaatatacaaggtaatattattacctttattttcagttgagaaaactggagtgtagaaatgttagtaatatgcccaagtcacatagctagtaagtaatggggcctagatttgaaagcaagcaacagtctctggaacccataattttagccactatgctgtaaagaaatgcaaatagccatcgtcattactcttccaaatccaggactgaattcgttcattgcaaatatggtggatctcagagagcctgaggcagaaaatgggcacctatatgcctctcttactactcacagcttaaagtcagtggagttgacgtatgatcaagccaccaaatctcagcatttctttggacaaaagacaaccttttttagtgaaggaaaattcacagcaaccaatctgggtagggattccaggtgattcttgccacctcattctcagtcattctcactagggttgattccacaaccacattataaactcctagtagaccaggccaatataattgctcatctcccatgacacccaagtgtcaataaataccaatgaatgaattgactccatttgtttgttttgcaccctgacaccagtagccctcattgcttagagatttttttccagtagtaaaaatagggattctagagtttcctttggtgcaaagtttgagctctagtgctttttaattactgtgactatcagtggagcagattattttttgataatgaaatcatcatagctgaggctctgtggaagacctttgacttcccatcaagagaagtgtaggataaaatgaaaattgaatgttgtttgttgatgattttctaatcgattgcttgctgttttttggtgattgcgaaacactagaaagtcccaaaggaatcagacatgcatagaaagagaaatgaaggggagaacatgtccctagggtaggtccacagggaagataattgaagatgacagaagacataatgtcacactcagaaagggattttttctggccctaccacacagaaaatgatgaccttgcagtggagagataagactggtaattaaggaggagttattgtgctaaagctggtcttccctttccactggtatttcattctggaaactgaaatgggacattaaataaagaatggtgtctcatttcagggcagagggacttacaaactatcaaaaccaggactgaaaggagccctgagctaatgtgtgttctcgttacagaattctgcctttcagcaaggaaaggtatttagctgggatctgaggattagcataaacttctgatattctacccttcctattttgggggaaaaagtcaaaccttagtagaatttgaaagcttaaaaatatcctgttcaatttgctttggatggcatttgttactattaaaattttaaaaatacagaaaccacatatgatccttgtcttgggagactgcacatcctgttttgtctaggacagtcccagtttatatttgcgatactggtataattattactatctctcaaaatgttgtggtttgagtaataaattatactctgcctatatataacccagcgattcttctgctcagtatctaacctagaaaattactcacacacatgtacaaggaggttactgtagcactgtttataaatcacaacataggaaaccacatgcatgcacactagaagaatggccaaatgaactacagaatattcatgctgagagcatcatctcacagttaaaagactgagatggatccatatgtggtgaaatagacaaatcttctagacatgtcctgaggggaaataaataatctttagaatattgtccaatatgatactgtttaggttactttaaaaatgcaaactagaccaggtgcagtggctcatgcctgtaatcccagcactttgggaggccgaggcgagaggatcacctgagttcaggggtttgagaccagcctgaccagcatggtgaaaccccgtctctactaaaaatacaaaaattaaccaggcgtggtggcaggtaccagtaatcccagctactcgggaggctgaggcaggaggattgcttgaatctgggaggcagttgcagtgagccaagatcataccactgcattccagcccggacgacagagcaagactttgtctcaaaaaaatacaaactaatttaaaagatattttaggggccagatatatgagtatgtaagatgaaaaatggaaagacatttataaaccagtaacaagggttatgttggatagaagtgatgggtttggattcaatatggtggtcaagggtgactttaaccataatatttcagccttttcctaaggacactatgatctttgattgcttgtggaattgatcatttattttaaatgtaatttaaaacttaaaactatgttccagaggtgatgttgctcagttcattgttttgaattgaagtaactgaggccttgagaagctgcataagttttccagggtcacaccatcgatatggggcagaggtggggcccaaatgagtctcctgacacccagtttctttctcactgtctggacaatgctctccttgaaggtttatgaagatttactgcgttgccttccctccatagatggaaataaatggctggacacaaactaattcacactcatcaaattttactccccttaaatccccaactaaaaagtaatggccagtatcattaattgaccccaggctggcagccacctgatttattctctgaagtctaccatctggttttgttttgaccttaattctccagcatgcatttctttgatgtggacattaaactgatcattaatggtttgaagaagtggtaagtgtatggtgagaagggtttccctggcgtatttttgtgacagttatcgtggggtcttttgctttggtttgtgtcattgcctttcctttggtaagcagtgcactcatggcctttcccctggcgattctctgagtccccgcgaaacctgctaatgtgggggcaactggaagcagctaaacccttattcttccctggagtatttgcatattaatagagatcaggacctgaagttaaatttgatgatgctttaaaggtggaaacttagacattaaccagcagattagtattagtggaaaggattttactgtacttatttttgcctttcttatttttctgaaattatgccaagtaactacactttgtgttaatgaacacatactttagtgatacatgttgtccgtgttgttgaatatagaacccagcactttacgtgaattatgtcatttaatccacaacacaactttgtgagataatgattttatctccggtgaatagttaaagaaacaccaagagattggctttttgagatttagcgtctcagggagggtaacaccgtagaagatagagctaggttcaaacccaggcagtccatcttcagagactcagctcctcaccaccatgccatattgctggcaccataataatgattatgcagttattatgatgttcaaaacataattaaacacaataaaatataatattatgtaagatgtaattatatgcaattagaagtgtggatactcatttgcatactttgatttcagaaacaccaaggggaagaaaacaaaatactttctgagagttgttgatagtattccagaaagtaggtggatttggcaaagtttgtaaggtggtttttttcccttcctttttggctcaacagtttgttggctggcactcatacttgggagataaatgcaaaccgagatctcaccattcacaccactcccagaggtcacacatcacttattgaataactgatgggtttggaaagagggcatggctgtaactcagctcaagaattccactgatgtcataaaaggtgatagctcagccccagtggcaggtgatggacagtgtagccatagagagcacatcagctctgtgctcattcccgtctcccgtctctgcagatttaatttatagctggaacttggcccttcctttgggcttacaggaaagcctaagagctgaatggctgagcttatcatgatctatgtggatggctcttcttgtctttctgacctccaccctaggacacctgtatctcctccaagcccagtagtgggcagttgttttcctagagatcagcagctcttattgtcaaaaaatatagttaaacagtttattagatgaactgagattcatattgttaggtcttccctcagtccacgggggcactttcctaattacctttgcaagaatatgttttattcctcagttattttccaattccttctggaaattcttttaaagagtctcaatcccagtgttttgcttccataagggaaaagcacgtagggtgatggtcagtaggaatgaatgcaatgttagcctggaaaagtgtctggatggatagggaaagtactcagaaaattgtgtttgtgtttgtgacttgaactaagtccgtattcctcctgatgtaagattttggattagaatattcaagatcatcacttcctaatattatataggaaatctcataatctatataggaataggaaatctgtataatctttatttgtatttactatgttattgttctttctcagcataggggtcttccagaaaaatcgatgagtctagatttttgaggactgctgtgatattcttttaaagatgaagactgtaatcaagccaaattttcccaaacacattccatggaacactaagcacgtggatcaacagttttgtagtcaaatatttggaaaatgttgcctctttcctcctcttcgtaggaatttgctgtggctctaagcattcctgcatccagtaaagatgtctgtttaactttgtttaacccagtgttttccagtttcacctcatcaaagagcccttacagagctgtggagaggagcacttgggagaagccagttttggagatgggattgcatcccaggagtacattgaaatgattgctttcttgaggattagggcccactgataagaacaggctgtaagcagtgttgtgacagtcttctcccagagctcttaatcgaacttttaagtttctcaattgaatagtgcacaaatacaatattttacccttttactgaaggaacatagtaaataatactgtgatagccccttgacagtagaaagatgatcttttaaaaaaatgctccagagaggttggaggagagaattacttttatctgtgtctatcagaatcccatgtacatcctggtcctgggcaaatattattttaagagcttttccatgactcaaataccttctttctattctgctcatttccttttctttttagccttaatgccattccacatttgagagagaacgttaacataaactgcagtaatgtcagtcatcaatatttgcatagctagggtgcagcttttggaagaagctctccagaaaaaattacagtacagtgtgcacattgcctaaaggtatttattgcttccaaagaatgaattatctcatcttatggaggaaaagatgaaggctcagagaagatgagccctaatttatgcagaacccctgataatattcatctggaataccaagaaataatgttaatacataaaaataatgtaatgtaaatcatgttatgcactgcagcagttagctggaagatctggaactgattcacctggtcagtttagagctttctgaactcccttggtattgtatccagactgggcttgatacatttaattatctaagtaaagtagatcttggccatcacctttgaataataccaacaatgagaaaaataaccgttaatggttgaggatttgcagtttagagaatatcacctacattatctttctaagctggtggagttacctcatttaacagatttatagtgctcagagaggttaagtgatttgtatatggtcacacagcttaatgtatacttgagctggagccagatcctaaccccttgtatctcccttaaattgtgctgtctcattccacagagctcctcaggcaaagctgtttgattggatataacctacattgtttgagtatctgatacattctgggtggttttccaaggggaattctttgaaagggagcttgaaatttgtatgttgaagttagataacctctttatttaacaaacacctgtacagtacagtgtttattgtcattacaggcaagcttctaagcactttgtaaatatcgaattgtgaatttctcttatcggtcccacagacagatataattttaccgtatttcacagatgtggaaactaatatcagaggctaaataattccctgggggacacagagccaccacctcatggaaccaggattgtgcctaggctctcaggctccaaggcctatgctcctcacctctgtgctgggttccttctccttctaaattctctgtttacacaagcatgggactgggtagaaaaactggatggagggtgattcagattgagatgttttcttggtgtaaacatgagatgtctgggtggtaagcttatatgaatggtttttacttttttctttgtactttcatatatttcctaaatttcctacaatatttatgtgttactttcctaataatgaaggggcatacgcagaaaacacattggctctagtataggatttcagcctttatagatgttgatgctgacttattagcaacctatttgttagcagcacatgcgtgcgtgtgcatgcacgtgggcacacacacacacacacacacacacacactctttgcaggggaattttgagccagaaatttatctgtaggcccatattcattcctttttgcacatttctattgtgaccttgggcacgtctctatccctctttgagccactgttttctcatctgataaaagaaggataatattgcttcaaagaaggttaataggactaagtaaggcactgaatatgcatgtattttataagttttaaagtgccttaaaaatgtgagtaactgtgtttaggtaaaaacatatatggcatgtttcttaaagtttctcttctctgttatttgcatagatgttatgcaacttgtgttgtagatagtttgccaaggagaattttatcctgcaggcctcagccagtcagtatatgagctaagatggaagttttgtgggataagcaatctgctgctcccttggagaattctctaaatttgcaagtagaaacattgcggttggcaaaatggagctggattaataacgtttatcattcaggtggaggctttgtgtttgcaaagggcctggtaattggtaattagctgatgccccttgtctcctcctgccaccctcttcctccctgccctgctgtgccccctggaatccagaggcagaggcacctgcatgctcccagtctgcttctccctgcacagtgcctggaaagtcccaggggaccacagccatctgacaagttggtactgggttgagttacaccagccacacacactagctctggccctgagctgggagtaaatgaggtcaggccaagagacatcaagcttcaaacatatattttcaaaataaataggaagtctctgtcctcatactctttccctgtcacctttgctccctaaaagtctaacctctttttagtcagtttcctggtatccaaaggcccattttacttcctccaaccatcctgtcagcaaatcacatttccctgttgtgttttctccagtagaaaggacttttctcatttatttgttcctgagaagaattaggaatctgagaatcttgatgatcttttggctgcttcttgggtagcaatttagactctcactgaacacccatctcatctcttcagagctattcaatcatgctgaagttcatttgaacaaactaagacttcctattagcaaccccatcctgcttaaaaaatggagattcccctctgccattaaagcagatctgagaggctttttttgaaggagggctgaaagttgaataattaacaggacatttcttttccaacccttcttttcttttcttttttcatcaatctgaagtatcctgggacgctctttggcctggcacatgggtaggtaggcatattgtcaaagattgagctgcagtttttcaatttgtgacttccctgataactacttcctctagaagtccccagaaatgaaaatgggagtgtgtgtccaggcacaattgcttctcccagtcttcctggggatgttccaatcttgtcaaccagttttcagttttgtttcagagtattgactcaagtaattaaatcatcaataatattagacttccctttttcctttttaatttttctttctctattattctttttcttcactatccaccccaaccccccattcatctgttctttttatggaaggccaaaaagtgtaatacatggtaaagaggggaaaggggactctgtagtagggagctgaggactagttcagtcaggcagccctagcttagcttcagtttccttatctgtaaagtggagaagtcaaacctgccttgagggcaggtgactgaaaccctgcaggtaagaccctaggacagatgggtcctggtaagagcatcgtcttgttgagaggctgaggtgggcagatcacaaggtcaggcgttaaagaccagcctggccaacatggtgaaaccccatctttactaaaattacaaaaattaactgagcgtggtgttgtgcacctgtaatcccagctacttgggaggctgaggcagaagaatcgcttgaacccaggaggtggagattgcaatgagctaagatcaggccactgaactccagcctgggcgacagagcaagactctgtctaaaaaaaaaaaaaaaaaaaaaaaaaagcattgtcctggggtgtaatcccagcagctctgccattgattggttgtgtgacctgtgggacttctgtagttcagtttcttcatctgtagaacggagtgacaatagcacctgtcatatagggttgtgttgggagcattaaaagagatcatgtaaagtgctttccaggatgccagaccaataatggtgagtccttcatacatattatctattgctgctattatcactgtttctggaatttaacaatttctggttccctggggagaagatgttccctggcagctgggcctgttttaggtcttgtgtttcccgcagagactctagggaaattcttaaaggggctttgtgagtatcatctctgagcataactgtgtgcccaggagctcgcaacacacccctcattccatggcaggatgtcgtcagctctggttagtctctgagtccattgcttagagctgagcttagaaaagagaatttctctcttagagacaagtgggatgctgtgggaaaacatagatctgggaagccagtcaggccaaagggatccaggagtaggagttcctatagtcggcatggatgtggataggtagacgcaggcccagtgcctgacttggggaccacggggaagccactcacctgattgtctctcacctgccacctgcagaccctgctccttacttgctgtttgggaaatattgtcgctttgcataggatggcactgttcttacttttgatgaatgtctgaaaaatgaacttcttatcctctacctttttcaactgccatatacatgctggcattactgttaacaaataggcccttttccctgatcacatgagcctcggattatggtctgcattgatcttctgtgagctcaggtggccatgttcaaagaaagctttgtgaacatgatgactgagaaagatgaatctgggtgccgcatgaggctggaaggtgggggcagtgatgtggcacatcagctcactcaggcaggacagaatagggtttaagcaaagaatgcattagaatgcattatgccatacgtcacccacttaccatggcataggactagagggggcctcaaagattatttaaagaaaaacaaaccaatgcctttaaggcttgtgactctgtaactagaggtgaagtttggctggatgcattcatttagcaactagttacttattgagcttttactgcatctcaggcactgcagtggaaacacaggatgaactagacaatgtccctccctctaggtcttctaaaaaaaagaccagtacatgaaaaataattgtaaattatgatacaaaacaaggagcagaatagggaagaactaaagcttggggcagaaatgaggctggctactttaggtgggatggccaaggataacatctctctgacatttgtgttaagaattaaagccatataaagtgcttcccagggtgccagaccaatatggtatattcttcataaatatgctacatgaagagtgggaagagcaaaagagcagaagagcattccagctggaggagcaaacatttgcaaaagttcaagatgggaagatctcggccctttccaggacttgaaaaaaggcccctggctggagagtcatgagagaagggaagcagcttcagatgaattcggagaggtagaagcagccagatcctctagagccttgtaggccacagtaagggggttgagttgtaatgcaaggcagagttctcaagctctatcatgaatcagaatcacctggagattcaatagagattgctggaccccatccctagagatggggaccttctaataagtttgcatgtggtgccgatgctactgggccagagaccagactttgagaaccactgctgtaaggcagtgagaaccctaacagaaggatgtttcatataattaatttgcaggacttagtaactgatggagtgtagggttaaagagggaaaagaatcaaagataattctaaaggtacagtcctgtgtgatcaggaggtaaaacatataggaaaaattcttgttttttgagacggagtctcgctctgtcgcccaggctggagtgcagtggcacaatcttggctcactgcaagctccgcttcccgagttcatgccattctcctgcctcagcctcccgagtagctgggactacaggcgcccgccaccacgcctggctaattttttgtatttttagtagagatggggtttcactgtgttagccaggatggtctcaatctcctgacctcatgatccacccgtctcggcctcccaaagtgctgggattacaggcatgagacactgctcccggcccgaaaaattatttattcagggctggatgatgagatggtataaccagcaggaatcttccttgggtttcagtaggtgtgggaattaactcacagatccatgtgtgtgtatgcattttttcttaaacaggtggtagagagggtacaaatatcagggagaaagtccacagaagcaggataagatactgtcaacctggggttccttcaggccttcccagccaaacccttccccctgcaactcaggatcagccacctcattgacttgccccacccaaggccaaaccaatattgacagcagcctcaatgcaccagcaggaggggtctacagttattgctgccacaggtcttacaccagatggccctcggtgggccagcctgttcttgcccagtctgttcttgccctgttctgaccagtggcagtgctgccttaccagggatgccctatctccacctgaatgaaccaggtctgggtttgcactgctctgccccagaatgccccgctgttttcacgtagtcaggcaggttccccagccttagttctaccagagccagcctcctcgcttccccatgcatcagtgctgctgagagtgaatccaagttacgggagtaaccttgctgagcaggaggccaaaaccagtgagtgacatgaagcatcgtccatccaaaagagaggccaagaaagcatggaaaggacagtgtcatggaggcctagcaggagacaaacttttaaaagaggcagagagatctaaatacatccaaactgttgaagcgtaaagcattagaaaaaaatatgatttctcaacaagttatgacaccttcatagagaacagttatacaggaatgagtgggtggaagaaaatagcaaccacagcccaataatgcagatctaatgttattaggttaaatactacacaagtaattactcagtgatgaaaattattaattgtgcacatgatgctcactctatgccctgggtgtttctgttcctgcttgaatagtggaataattagcagataactgcgctattaattatgccaaagcttgctttgagatagactaaaaggccaaacatgtaggatgaggaggagctatgtgttctgttcatctttgtgccctgagaagagcagatggaaagcttgaggtcaacctgggcccacagctggccaggtagactgaagttctgtcatgccctgccttgaaagggaaccagagtgcctatgcaggaagcccacgcacatagcacttaggcatagcagggggttaaaggtgttttcaagttcaagtcatgacacatttataagccaaagccccaagggccagtattttccaatctcttcctccaccatccttggccatatggtaaacatttctctttcctttccccattgacaccaacaagttcatctcacatgggtaagactcagacaaatcccatagctttttacacgtagattttccacaaagcgaatcccggcaaacgatatacagaactcctagcttatcttgccatgggatgagataagatggtaagaagtcatcctgtggccaggtgtggtggcttatgcctgtcatcccagcactttggaaggctgaggggggaggattgcttgagcccagtagtttgaaaacagcctgggcaacatgatgaaaccttgtctctaacaacaacaacaacaacaaaattagctgagtgtggtggcacatgcctgtagtccctgctactcggaggctgaggcaggagaatcactcaagcctgggatatggaggtcacagtgagccaagaggggatcactgcactccagcctgggcaacagagtgagaccctgtctcaaaaaaaaaaaaaaaaaaaaagagagagagagagagaagctatcctgctggagtctgaaagcttgacctagcactttcctatagaaccttatatgaggatagaaatcttgttttgtgctccttgttttgtgctccaatatggtagccactagccacacatgcctgttaaacatatgcatattaaacatattaaacattgaaatagggctaatgtgactgaagaatagaactttatttgtttatttatttatttattttgtttatttttgagacagaatcttgctctgtcaccaggctggagtgcagtggcacgatctcagctcactgcaatctctgcctcctgggttcaggtgattcccctgcctcagcctcccgagtagctgggactacaggtgcattccaccatgcccagctaattttttgcattttagtagagatgggggtttcaccatgttggctaggatggtctcaatctcctgaccttgtgatccgcctgcctcggcctcccaaagtgctgggattacaggcttgagccaccgcacctggcctaatttaaatttaaataaccacatatgggtgatggttaaagcaggacttcagaagacactctggctttagttctccttatgcactcacgactggggttgtctgggctcgagggacctcagagcctcttagggtaatgtgtgtcctctgggatgacatttcttggacaatttcccttctcctctgaaatgtgagcttcattcatggtaaatgagtaaaaatctgcctggaattacttacaagggtgaagaatgaacatattaacaggctatagataataagaaagtcctttaaaaatgaatgtggtggctgccaaatcaatttgtgcaaaataacggtagacaaggatgagctgcggctgacagggagcaattaagttttgtaattttaccttgaattattaatttcaagaagggttgcttctctcactgcagtctacatcttcgccctttgagagtcgggtggaaggcactgtgggtgagcctccatttccaggttgttgagaaaccatctctcttggtttcttttcttatgctttcagctcttcattgggggttgcacttcattttcttctcacattcacaacaaattagccatacacataaatacaataaaggatacctgtcccaaggaaaagcatcctcatcacatgtcatgggccagtcccttttacaaggtgctcctgcacagccatggcaggtactcatgtgtgtgccagacagaggggagtttctaagctaggaaaagtggatttgtgggaagttgttttcctccaggtaaagataaagtggctttgcttgactggttgactcattggccaaactaatgatgctactaacacccttgatcttaggattaagcattgtctgggatattttgagtcatgaaagttaccttcctacagagcccagctctaggaaaccatcttacaaatacatgtgcatcccaaagacgaccaggagagtgaggaaggcttggctcaacccagcccagttgctgacaaagccatcaaagtacaggtcttacttccaacagtgggtcagtgggaagaacacaaacaccagcgtctctcaaagggcttgccttgatattgccgcctctcggcaattgaacacttctcccgttcgcctgaaccctcagacttctttgaagaaactctttccacctatccaagtgcactaagttcctggcatataaaattagatgtggttattttatgaggtggtatcgttttgtggaaagttgttttggggtgggaggtcagaccaattcgggttttaatttcatttcagttacttattcgctgtttgactttggcaaactgacacaagatctctgagcctgcttccttgtctgtgaaactgggctaatgctgctgtgtgagatggtggtgagggttataagtgaggaaggtgaagttcctagcacagtagctcacatgggagaaggtggctggcactgtgcttccaggagatggaagcacagccaagtggcccagaggacaattcccagctagccccagaaataacaggaatccttcctccagggatcatagccttctgaactgcttccctcctgcctgcccttctctttgttcctctttcttcactgtgggtcagggaaaatatcatgcattcattcactcattcatgtattcaacaaatacctctggagcctgctgcctgccaggaactgctctaggtgctaggaatacagccataagcccaacagagtcctgacctcatgatgcttatattttagtggggagttaggcacagatgcagtaaacaaagaagatacaacatccagtggcgataactgctatatagtgagataaagtggcgtaagagcatatgatggaggtgacagaagcctattaacatcaacggtgagtatctgatttttagcatcacctgcacacacacacagagtaaggagggtgggtccctgagtttacagagccctgttatgaggaaggagcactgagtgagggggacactcactcatatgaagggactgcatggagtgggatctaagaggtaggaagtggttggaactatacccgctgcagagtagttgaggaagaaaaggggaaaaggcaggtaggtgacatgaagtagggagagaatggggaaggaagatggcagctgccatgtggcaagagagagggaggctttggagatctctcagttgatggaacatgcttctgggtgtcctcatggagcctcaggaacaatctgcatgcctcactgatgcttttgccgtcagttttgggttttttagacctgggacgcttgacactgaccacaaggtgagggccaggctggatttgtatgtttgttgttttaagtaatccaaaccttataaacacatgtaaggagaaaacccaaggctctttccctgttccctatattccagtctccagaagtgacttatattagaagggaaatgtgaatcctctctgatcctttcctataaatatacaaacactcacctatgcatagtgtttacaaataaatagtggcttccttgtctttttaaaaaagagatgtgatatcataatttcccagggccaaataaaaaaaaataactacaagaatattctagtaccaatcctgcatcctcaaactgtagcagttctataaaaaagcctatctcttcctcccaccgtcaagcccttctaacttcttagcacactctgcctctgtctgccattctctgcaaagaaatggtttctccggcaggtattggcaggcaaaattatatcattgcctttccacctatcctacagtcgttaagtaagagagatgcccttactcccgaccctctcacctgaaacagggtaaggagaagggtgtagaaactaaataattcaccttttggtgtaccctgaaagagagaggagatgaatgatatgtcaccatggaaatcaggttctgtttactagtagcttcccctacttggagtgcatcaggttagcctgtaggacagtggctgtcagccctggctgcacattgcaatctcctggggctaatcaaatacagataccggtgccccacccctaaggatatgatttcattagtttgtgagatgggctggcatccaaggtccttctaatgtgaaggcaaagattgagagtggctgctatagaagagctctttctggtaaatcagtcattatcctgagcatcaagagtctgcataaataaattcagaactgtgttttgttgttaatattgatactgcattcacctggggaaggaggctgcttatttgcccacttttcagaaacaatgaatctttagtccagctccttcccttttcttccttcgttcggcctccttccttgtgaggagtaacagctgtagaagtcaggggaccttactggccgcactaagagagtacctgtgtgtatcagccttcaagcagttttggggtcagacacccacttctcagacttccaggcagctgccaacctttgccttcccttcttggatttctttcaacatgcagatttatgaggtggggaatgcatgaggggtggctggcgtccagacttactgtaaccagagagaaatgaacagagcgtgctccaggggacatgcagcacttcctgaacaaactactggtgtcgccattaatgctactgacttaggaacctcatgtgcctttttgtctttttcttcactcagcaggaccggcatctattgctaatgttaggtttaagcatttagggcagagcatgccaatcttcccttgatccatactgctcattgatcagtggtcacatttgtagcacacctcatgtctgtgggaggtagctgtggggttgagaactgctgaggcagggggttgagtgttcccaattaggggttggcagtaatcaggtactggggcggggcttatgccacttgctttattgttcacgtaataacagtggacttggattgtgaattccttggaacaagaagagtcccttctactgtatttacccgggaagacttctctgatttcctgggctgatttgcattcccctcctaggtactttggtagttgtccccggagtggatcatagccaataccaccctgtgttgttcccactaatttacctatccgcatgcccgtgaatcacaaaccctcaagggcagggtgtccccagtgcccacaccacactggttttgtagtaagaggtgcatgcacatatgctaggagatggaatgcttatcagcacccacatttcttccagcctaattgtatgcgctacattcacacacacctggatctaaatcctgctctttgcttccaggctgtctgaccttgggcaagatacttccccttgctaagtcttgtctccttcctttctaggatgcagctgatgataggactgaaccgattgggtgctacggagtattaaatgtgatagtatctgccaagggttagcacagggctgctcacgggatcagtgctcagtaaatgctagttatcatgcaatccttattgttagtttcattattatctgtatgataaattgattgtagtgtcatctgcaaataggtaaataaagcattatacattgccaaaacaactttaaccaccttacacttgatatttattctgattaaacaacaatgacctgagaaagtagtatagaaagtgattgtgctatgctggatacaatatcagctagaatgcaaacgttagcagccaacatactgactgcagccatctaagattcttgggaaggcgggaaaattaatagaaagagcactggagagggagtccacgtgggcaggaagctaagcagcagtgaagacagcgtggcaagatttggatagaaggactggccagcactgtggagagccctcttaattggagggagcagctgtgtataaagacagtctgcagagcagcatgccattgccgtttctgagtaaatttgtacactgtttgctgtgagtcactgccaagatcctctcttttgtacattatcagatcaaagctttaactcgaccaaaaaaaggtctcatctcccatgcctgtgtagggaaactgaatctcacttgcgcccttctgctcccatggaaccatcgcagaggcctagaatgccctagctttctttctcttcttgtgtgctaagtcaccaaaatctgacatgctgaactgtcaacttaatggtggagttcgggttgagagctgatttctaaaaccactgccacctctggacagcagccattcggatatcaggtcaaggtttgggagactattaagaagccagcaccaagacatgctggtggagaagtcggagttttatcacgtcctacctactttgcggtgaaatgaaggtcttcatagtgaggtggtgatgaacgttgccgatgcggtgaagtcatccttcatcactgtgctattttgcttagagcttcaactgctacattatgtcttaaaacttgtcaagttgtgcacagtacactgacttcataggagaaaaaacgcgttgtgtaaaaatataaaaaatcagacatttctggtagaacgagacattataactcaaaagtcctacagataaataataattaggaatggcatttactccacagagcaggaagaaaacaacattctctatcagctacatcctcaaatggttacagtttcctgtctctaaccacaactaataaaaggccaggtacacagcctttaggaagttaacataaattttttcttggggaggtggcatggcggtggggggaacaactgtaaagaagtctgtttctgtttcctaagtatttttgccaataaaaacaaaatcgttccccacttgttagaaaatgtaacaaaaccacctgtctgcccttgaggagatggagaacaaaatcaacaatatttgcattttgactacacacagaattaatccatagaagcagaggcatttttgaggcccaagcgtgataacacttccgtgcatggttctacagacaagataatgtccgtgcttcaacgacagagatggggctaggctgcagcaagggcagtgggttcctagggcaaaacattttaggacggttattcctcatcctcaaactctgaacttatctggccattttaggagaggaaactgaggatccaggaagtgaagtgattctcaaaggtatcacagctagtcaatagcagatccagtacccagggagggaaacagctgattataagataatcaaaatgaataaacacatctattctatcctgtgtgtatttcgatgggcatgttggggagaatcattggtgattctcagactcctttttttttttttttttttttatgaattagcagatccttggatttcactggagaaaccagtgtggctactgatccattacagaatctagcattccccagagagcaaaaacctcctcctggggggcgcgctccagcctatatagatttggtgcaccaacactgcactgtcctcatgaataatctctgatcagaggatactaattaagacgtggcaatgcccacttagtaaattagctaaattgacaaaactcaatttaaataacaattttgtctcttgtgatagaattataacgacacccttcacttaatgagccagacacttaataattcaaacatacttacagaaaaatcaaacaaagcttctcaatcccagactgggtttcccaccacctctcctgccactgctttgcaaaaatggtagcttgaacactgtggaggagaggctgggtatttggtgaggagggaggggctgaccagtttctgggcagagtaattggtaggtgactccttcaacaaacttccagccagctgcctgtttttgtaaataaagttttactgcggcacagatatgcttatttctttgtatagttgtccagagctgctttcaaaccaccatcaaaaatttgaggagttgagtagtggtgacagagaccttatggcttgaaaagccttcaacatttattatctggccctttaagaaaaaaatctgaccctttgagaacaagtttgccaacccgtagacttgggctgcaccttggatctatggttccctgggtgtgcaaccttgaatagatacttcccacatccctggcctatgattttcttaagtgtaaaatagggatgatacaaagactatctcctgagactgtgagaattaggtaagatgctgcacgcttatctgtgcttggcacatagtaagtgttcaataaaaggctaatgagattagtaaaagcaatgataataggaacatatattgagtacttatatgttctagactctgtgctcagttctttatctatattaacttgtttaatcccataacaacctatgagggagatattataattattttaattttacaaatggataaagagtatttattattattttgtctattcttctaaattctcatttagtaacacttttgcccagtagtaactgctctcctggctggcaagctgctcaagggaaggtcctgagggtcctcattgtccctggaccctagacctaaaggcatggatcattctattggtcactgacaacactgaaatcaaatatttcttctctcacgtgagtggtgggtccctttctccattctgcctttccagcctcccttctttgtctttcacatcctctccaggcctttgcagtgtaacaggaggtggacatcacccccaggtatggccagacagatagtgaaaactcaggccagtaaaaactcagaaatcctgggagccattaagttttgaaagagccacatattcatttattcagtacacatctattgtgtgcctaacatgcaccagccatggaggttatacttgcaagacaaaatgctccctgcctctctaaagcttgcagtctattcaagaaaagtttacagctaccgcacagctgccaccttaaagaaatctttctttttctttcttcttttttttttttttagcacaaaagtaaatgtgttcttcctgggatgtccgtgtccaaacacagtcacacatcacttaaggatggggatatgttaagagaaatgcatcattaggcaattttctcattgtgtgaacatcagagtgtactcacacgaagctagatgagagcctacctactacctaggctataaggtagagcctattgctcctacgctgtaaacctgtatagcatgttactctcccgaatactgtaggcaattagaacacattggtaaatgtaatgtgtttttctaaacatagaaaaagcatgccaaaaatatggtatgaaataaaaaatggtccacctgtacaggacacttgccatgaatggagcttggaagttgctctgagtgaatcagtgagtaagtggtgagtaaatgtgaaggcttaggatggttactgtacactactgtagactatcaacactgtacacttaggctatgctacatttattaaaaatattttttcttcatcagtagaaaattaaccatagcagagtgtaactttacaaacttttcattttttaactttttactcttttgtaataacgcttagcttaaaacacaaatattgtataactgtgcaaaaatattttctttcttcatatccttattctacaagcatttttctttcttttttttcttttctttttttttttgaaatggagtcttgctctgtcgcccaggctggagtacagtggcgtgatctcggctcactgcaagctccgcctcctgggttcacgccattctcctaccttagcctcgggagtagctgggactacaggcatgcaccaccacgccctgctaatttttttgtatttttagtagagacggggtttcaccgcattagccaggatggtcttgatctcctgacctcgtgatccgcccacctcagcctcccaaagtgctgggattacaggcgtgagccactgtgcccggccttttttttttttttaaactttttaagctcttttgttaaaaactaagacacaaacacacacaggagcctaggtctacacagggtcaggaccctccctatcactgtcttccacctccacatctggtctcattgaaggtcttcagggacaataacattcatgaatttgtcacctcctataacaatgccttcttctggaatatgtcctgaaggacctgcctgaggctgttttatagttaatttttattagtagaaggaatacactctagactgtgataaaaaatatgatatagtaaatacataaaccagtaacagtcgtttattattattgtcaattatgtgctgtatgtaattgtgtgtgctgtacttttatatgacgggcagcacagtatgttagtttacaaataggtgagtgatgcattgtgttatgacattaggatgggtgcgatgccactaggaggtaggaatttttcagctccattccatcattgactgagacgtcgttatgcatgtatatatatgttttcatataaaattaatatacttaaagttcttataaggaactcagctctatattaaggtccctaaaaaatataagaaaggtaaaaaaagtcaacctagagttagctccttctctgtgtcaggcactgaataaggtactttgccctcttcagctcattaatttcttaccacaagagttgatcatttcccattttatatgtggaaaaacagagattctgagtgtttaagtgtcttgcttaaggatagttggctatgaagaggcagagtcatctttcagatcttacctccaaaccccaacacctcccattccccagggagttttctcactgtgtcatctagagccctggtgacggctgtgggtggggagaggggtgattagggtcccatggtcccctccgtctattgaagtagcgccttcttccacagttttctgtgtgtgtattctacagatctttagaagggacctgctgctttaacaatgaaggtagaactgtgctgagaagttggtggtctttatggagtgccagctgtgtgccagactctgatcactctcaaccaggggcaattttgtctctcagcagacatttagcagtgtctggaggcatttttgtttttcacaccttgagtattgctattggcatctaatgcaatggtctccaacctttttggcaccagggaccagtttcgtggaagacaatttttccacagaccgggaggaggattcaagcacattacatttattgtgcactttatttctattagtattatattttaatttataatgaaataattatacaactcaccttaatgtagaatcaatgggaaccctgagcttgtttttctgcaactagacagtcccctctgagggtgatgggaaacagtgacagatcattaggcattagattctcataaggagcacgcaacttagatccctcacatgcacagttcacaatagggtttgtgcttctgtgagaatctaatcccaccactgatctgacaggagggggagctcaggcagtaatgtgagtgatggggagcagctgtaaatacagataaagcttcacccactcacctgccactcacttcctgctgtgcagctcggttcctacctggccacagactggtaccagttcatggtccaggtgttggggaccccagatctagtgggtaaggccaggaatgctgctgctaatcatacagtgagcaagaattgtctaatagaatgccgatagtgccatggctgagagaccctgttccatactaattcttagataaacagaggtgagaaaaacagacagaaagcctgccctcatgaagtgtgcttcagtggggtaggcagatattaatccagtcacccacgctgagtctttaatctcacaaactgaagccgcgccccgaagggaaagcacagggtgtcgggagagcagataacaaggatcccttgtctgtgagctccagaaaggtgctttttaaatttatttatttattgttattattattttttgatgtggagttttgctcttgttgcccaggctggaatgcaatggataatctcggctcactacaacctctgcctcctgggttcaagcaattctcctgtctcagccgcccaagtagctgggattacaggcctgtgcccccaggcccagctaattttgtatttttagtagagactgagttggtcaggctggttagagaggcttctgtctgaaggcagagggcaggtggagtgggagtggtgtaggcacaggttactgcaggtgcaaaggccccatggaaccagggcaagtgtctgttggaaggcctgtgggctagaaaggagagtgcaagaggtgggctgcacagtgatggaaagaagaaccaaatctggcagaactttggccatcttaaggaatctggacttgattaaactaagagctgtggggaccgtgacggctcctccagcagggtatggcatgattttattggaactggaaaagatcacgctgactgttatgtggaaaacaaactggatggagcaagagtggccctagggaaccagcagacatcgaataccacacgctttcttgcattgcagggatgggacaggggcattcccctccagaatagaaccccacttccctggggctgccaattttggtttgcgttaacagcagggtcacgctgcatcaggaactctgtcacctataaatgtcaagtcccatcctttctcccaatttaaaaaacacacaccattcagaagtaaaactgtattatatcatttcagtttcacatctgttctgtagttgcaaaataacaattccactgctgtcgttagcctgaacgaaaacagttcgacatgagaaggatgtgggcctgtctctaatttcttttttctttattgaccttttccaaggtatcaggaagcagattctctcattaagatgttgacacctgagaaagtctgtagcatatcttatttatggcagtgtgtgtatgggtgatggagaagggagtttaaaaatcaactgtcaaggcaataaaaatattatcttccttggtctattctctctctgcaatgacttctgacttctctgaatcatgaagtggatccatgcctctcccatggtctaattaacttagagggagactgggtaggaggagaaatatgtaaagatgcccagaaacacaagtttgtggagctgacacaattcatttctgattagcaacagttcatgcactcgtccatgagccacacagatgttcaagtgggttgtcttgaggtattgggaaattatcataaatttgaactcatttgcaaggatctatttccatattttacagaaaattgtaattttccctcccaagttccctccattgtgaggaggaggaatttttcaccaagatggtgctggctctgctggaagcagctcttatgagttgaggatgcagggcggtctggagttggccttggccctgcaagcagtacagagaaatagaggacacagctcctgccctccacattggtcggagagaccacgagggttcaggaaacagagatcaccaactagcctgctcaaaggttaactgtcaggaacctcagtctttgttgcttccaaggcttggtctgaactcttcctttcagccttgaccactgtgtgtgctcgcctctgaactcagattttcttactcagctgaaataaagaatgacaataatcccttcacaatgtcattaggattaaatgagagactctatgtaaaacacctggcaaatcgtatgcgtgggacaaacatggttgttgatatcaatagctaaaaaagaggaataagtataggaatgtgttgggctgggctggaggaacctgcaggtctttggaacgctctgcagcttctctattccattcaatggaaatatcattgagttttccccacacccaggccatcaatgtctctgcttcctaaagtacccgtgtgaagttgagtttcagctttggagcatgcttcaggaatttgaattggatgaataggttttaaaatattcattggtacatttcctttgaagaaaacccaggattctgggttggatttatcttgaggaataagcagtagctgtctaaaggttgatcccaccctgagatccaggccctgtggacaggcaatacttaggtcctggacctgtggcccgcgggccatattctacacaggaatatggcccagacttttaaaaaatgtgaatcctttctaacatttaaactctaggagttttcacataaaaagattttagggcctctcttgagaaaacagaaggtcccacattcccatacaagtccatcccacgttgatggagagttgccgttttcacaagattacacatgctatttggttaccctcacctcctggcttgtctattatattaatttatctgcctggcctcatcaggcattagagtttgcagatctgggggcagtggttctcaaggtgtggtcctgggatcagtggaatcagcatcacctgggagcttgttagaaatgcacattctcaggcccttcccaggcctactgattcagaacagttgacggtagggtccagggacctgtgttttagccagcccccaaggtgactctgacgctcattaagtttgagaatccttaccccatggtaagggatgagcactggaaaatgaagggaactgcttctaatgtcatctttgccacttaattcagtgggaaaatttagaaaagccactttgctttcttattgtctctgtaaagtggtaagagtgggctaatagcatggtgtgactctataattctccaggtctgtggactaagaattagtatttataaagtgctgaccatgtgccaggaccggggtaagcactttacctggattatgtcatttaacactaaccatggctccctttgaggactgattttatggatggagaaattgaggctcaggggcgtgagctgccacaccaaaggccctgcctttgagtgccctggatttatgtaactgagagctggtgagccccaactccctgatattctatttcctgtgacctgcccatgcacagaggtgtctgaaaggtgatgacggcagtgtggccggcacctcagaacaaagctggcaggtccttcaaggcaggcagaggcatgttctaccaaacaggaaggattatcaaaaatagaacgtggcagccgtggccttctccagccccagttgcaaggagccagccgtgactctggagagatgctgaaggaggcaggagatttggaaagggagggagggagagcagccaggcctgtgcagtgaataccagggaggctttgaaactcccccgtcctcagtggaatcccagccatcccttatggagtgaccttgggagagcattttaatacctctgtgccttggtttcctcatctgagaaatggggacaatccccacttcacaatgattgggagcaaacaggttaatgaaaagcatctgggatgctgtaaacagctgaacatgtggtggctctcaccagtgctaggaaccttgcttgccctttctggagagctctagaagcaccttgtgctgttgtctgtgatgatcggaaagctgaacggtttctgaccatgggaacagccttcctcctccatctgccttgtgggctccagttgctcagaatgcttcattttccagacatcttgtttccttgccctgtctcttgtctgctacatgttctaacttctttctcccttcagaaatcctctctggggtctatccaacctgagaatggctggcaaatacctctaggaggatttaaatcctgactacaacttcagaggtgtcttcttagcatgaccaggacaaaagagcattcacagggaccctcaattctcagattagggaaccgactgtggtttcattttctttctcttggccccagaagaatcctctgacatggttaaaaaggtgtgggttaaaagcagacaggctggttctgctgcagctgtatgagcttgggaaagtcatgcaacctctccaggactgtgttatcattcatacaacgggtcaataataccatactaacgccttagcaggcatataccgagtggtagttctcttctctcctctagttagaagacatatataattttgggcagagagctcaaggggagagactggaacaaatttgaactctttgggtctcagagtgaaaaatcagtgagaataaactcaacagaaatgctaacaagtgttattaattgagctgttacttcgtgcctggcacagtgccaaacactttgtatgtgttgtctcatgcaatcttcccaggcgttcttttttaattagggagatagtattgtgctcatttcgaaggtgagaaaatcagggctcagagaagtgaagtctgttgcccagagctcacagctactaactggctgagctgcatctgcagtggcctcttcacacgggtactaggaaggagtagaacggaggctggatgtgctcctcccgcttaaaaatcattctttcagcctgcagaacacttgcctctgggtctctcggcccccaaggcttttcttcagcagccagcacctctggcttttgcttattgtttggattcgcccacggcctccgtcctttgtgcagcctgatttttcttgactcgtccttatttgcataagagtctcccagaatattgatgtggctcttttccagaaaagcgagcatcccccacactgctggctccaggaagccacatgagcaggccaggcaggctccagccctggtgcaacaccccggtgccatcccctcctccctgcttccttgcatccattcacagaccatcagctgagcaaagctcctcagagccaaagctgtgtttacccaggaagccccagttcactctggcaggccatctcagcacagcaaatatgaggaaggagtgatctaacagtctccctgcccttgacagaggaggggcctcaagctcccagtcacttgaagagaaggccaagcctccagccctgtaggattattctggactgccacagtgaagaaagcagtgttccagccccccacatccagcccagccaggggtatccggaggcaggcatctgagggaagtggtgtgtttgctctctaactgggcgactgagggggacgagtcacaggaagtccaagaaggctcttccaggagctacctttatgtttcttcatgtgtgttcttagctggttttcatattgggaggaaagggcaggagtgttttggaaattgatctttaccccagctcctgtgttgggcattaggtgggcagaattccagcaaaacactgcaaagaactgggggatctggcatagtcactcatccattcattcattcattcattcattcactttttcattccaccagtctactgaggactcattgtgtatcagccactgtttcaaggaataagataggccagttcctagtctcctggagctacgttctaatggggtggggacagacaataaacaaacctaatagaaaaataatttcacacagcgataggcaatctgaaagtcacacagtaggatcctgtcattgagagtgacgtggggctgagggagactacttgaaactgggtgggcagtgacatggaaagggcctttaggctggacctgaatatcgagatggagccagctatgcaaagatctggggagacagtgttccaggcagagggaagagcgtgggcaaggccctgagtcaggatggagttttgccatatgggaggaatggaatgaaggccagggggtttggagaggagcgctgagtatacccatgctggagtgagtttacaatgtatctggaactgttctcaatgcctaacctgcaacatacgtttatctttacacaacactatgactccctgttaccattttggaaacttaagttcaaagagattgtgcaaacttccaaggtcacacacttaatcagtgatagagctgtgatatgaactcaagcagtctgataggggaagctgtactcttaacctgtacattatacagtcactgcaaactcacttgaatgtattaacaaaatgttccaagattgtgaagaggagatgggtcttggaataggacagaacattttccaaggggaatgaggagggacctggcatttgttgatggtgcctaggctgagtgccaggcactgggctgcatgctttctcatccattattctgatcccaaccctccaaggtagacttcattagccctgttttacagatggtgaaagcacaggctcagagaggtgaagcttcctgcccagggccacgcaactaatatcagattgaccgagtgagggttcagggcatctgccctggcatctgggcctttctgaccctccacattaagctgatgcttttttgtctcattatttcttattcctctccctccaaaaatgaaaatgaatatccccaaaaatgtaaaaatcttaacagtaagtgcaaacctgctttagggtgaagggaatggcgggctgtcagcatgcatgtattgttcttcaaattacctgttacctagaggggaggagcaggaccagatccttcactgtcatggtgcctgctgggtgagcatgagcatacataaatacatacagcataaatacatacagcatacatggtgcctgctgggtgagcatgagcatacaggcattccataaataaaaagtaaatgtcacaccgtgcagtgccgctgcgttctgcaaagcttcacccaggggtccttgcaattgccagaagcagggtcaggatttgtcattcttattcctctcaggcctttcctctggggctgatcctaccttcaggagacccagagagctcatcttgtaaggcaccgagagaagagccaggccaccattcggtacacaccctcttcacttctaagcttaaattctaggtgtgaaaatttcatccaacctcttctcttcattcattcacttgacaaatagttatttgtctgctgtgacctaggctctgaagatactgtggggaacagtgcagatgaaggccctgctctcacagagcttatattttagtagagggattcagaacgttttttaaaaaaaggtaaacaaatacacataagtgttatgaaaaagataaaacacagtaatgacagaaagagatgggtagggggagaatgattatttgcacctttctctgttttttcatacccattcatccatccctccctttctctgtccactcattcattcatccatcccctacatctctctctctctctatctgtatatctgactatcatctacctacacacacatagaaacacatatacatttatagattttcatagatctctctttatccctccctccttcccttctctcctttcttattccttccttccacaattaatttttttttttttttttagagacagggtcttgctctgttccccaggctggagtgcagtggtgtgattatggctcactgcagtctggaacttatggactaagcgattctcccacctcagcctcccaaccagctgggattatagatgtgtgccactacacctggctcacaactactttctgacacccactcagggccagttcctcaggatggtttgtctcttttttttttcttcagctccccagtgactggcacctggtcattcgtccctgcctcctcagtagtgaacatactgtttggcataagggcaagcataacaagcatttgtgaaattatcaaattagaagaatatcctatacttttttatatgcatccagttacaaaggtgcaatagaagcctctgcatgtcctcccaaccttagaatcaccacgttccctgatatgaaggatgattattaaaggaaaagcagagcatgtggataaaagtgtatagccctgtattcgaatttccttggcatctttttgaatattcatgcaaaagtcgaagactgttccatttatgaatcagtttcctgattatcaattcaactccacaagcatttgctgcacgactactatgtgcagaatgtggtagggatccattgaagatacaatccttgccctcctgttctttacttcccaggagggagatcataataatgtggacagaactgtaaatagaggcacctgggaagcctcatggaggcccatgagaggagagatcccattccatgttcctggggctgcctgaagggatggcttttgagatttttcttgaaggagatagcccattagcccagtttggctgaagggaagaaggaatcaatgaaaagtgagaaataacttgtaaaagtagctggagcctggaactccatactgaatggagactgaatttggaggcgttggtacccagaggcgggggagcacagcagctttttaatggtgggggtgatgtgaaatggaatgccatgatcaggttagaatttgatttctttgggctgtggctcacagagtaaatagcatgttcaatgtgatctttaaaataaattacagagatcaaaagggaacagagtaggagagtttctgagtgtacacagaggtgtagcatttcagattcatttaattaaaggagccaactgagaaggttgtcaccctgtcatttaagaatttttgatagaagagccagaggtttcatttttgaagtggcaaatgcaaatagactcttcaccatacatacgtgctcatatcagttagtaactcttctttctcgattttcttttatagttaatactggcttagattatcctctggcaggattcacatttaccagaaaaacacaacctcgcaatgaaggagggttctgcgtttgaggggatcacagatgcttcccactgagggatccagtgccatctcttctgaagcatgttcaagcccatctggcaccattctcagtagatggtggtggcctttctctccctctttctgttctactatcatgagatgagacaggagccatcgtggaaggtggttggaagcttggtcactggagccagcctgtcagattcaaaccccagctctagctccatgcccctagagaaagttattaacctttctgagcctcactttcctcataagagaacaagcagaccttcctcatagggttgttttaggattaagagcattgatatatgcaaagcgcttagtgtctagcatttactaagcactcaaaaaacagtagtattatctcagcataacagtctttttggactttcaaacaacagaagctttctcaagacaaacctaggtaaacagaagtggagatcactgtgtgaaccagggttgagaggcttgagttttgggccacacaacatggcccctctcttgtagcaaagaagtcattctctgggggttgtgtcagtttctcttttggttttagttcttgcacctggatcatgctacagattttctatgtgacaggaggcctcaggtgtactcttttcccctatgaagtattttgtccaatgttgtgttcctctgggaattttgtcgttattcctggtaacagccacattctttcacagcatcatttgatctcttaagattcgggtgtatcaggaccagattctgtccccagctctatgtgatgaaccaccagcttcagcagcctcctctcacagtctgggctgcaggttcttactgaggctgagccaaacactggcagcccacggggcagatgtggcctgtgatgttttgactggtcttcatgatgttggctcactcaaaattataaaattaatttgaatttgatgagactatataaaattgggcggttgaatgtaaacatttagatttccagctgctccgaagtcagattagccagcgtcaccggtcctgcattcccacaccacagtgattggctggagctgatgagacctgcctgccttatctgggacacggtccccaccaaccctttccctccctggctgctctgtcattctcactcttgcagggatagagtcagggcaagagaaaaggggaatggttcttatactcattcctttatcaaatgtgggaagactttgggctttaccttccctagtgtggacagtctcagggattctcccagcttatcttctttggtcctcttgtttgtttcacggacattccttctgatgctgcatatgtggccccagacagaggattcttaatgcttccaaataacacaacacatggtggagtcagggcttgaatccagatcttctggataccattgcagaagatatctgccccttccccacatagtcttctggcttagaaattcttggctaattcactcagagcctgctgtgtgctgcctgctccattctggaggttcagagttggaagacatggacacctgccttggatcacaccctgatcagaccagtgcacccattcattcaacagatagttatcaatagaaatcaaatgtttggatattgagaatagcattatgatgagggtccagagtatgttattaataataatggtataattttgagcttctgttatatacacaaacatatgtatagctacaccaaggattgtgctcaagttttgacttatattagcttgtttaagcctcttccacacactatttaaggcaggtactattattatcatcattttatggatgacaaaactgagaagctgaaaatttaggaaacttgcccaagatcacacagccaagaagcagacaccagaaccagagccccaggctcacaaacttcactaccttgactcctaggctctatgttattctgaccatctctcagccaggaagtcactcccttttatacaaatgacattgttggtgctgatggttaaatatttctattctcacaacatgtgaaagagagatccttgtgatttgttacctaagccccaagggtttctcctaccatttcagagagatagaagcttttctttgcccctgaactgtgactaagaaaacagaaaggaggaaaaagccatcagaagactaaaaatctctcatctttgcaaataagaattcactctaaccaagcttttttgcatgcagcactgggaagagacctgttttttattctatcaactcgtccgtataacaatttattgagaacttgttgtgtacctgatgcactgctggcattgggtatgtaaaaatcaatgcagcatggtcctttctccaagtaactcaatctcctgcttggttctctttcctggatcattttaattatggctcccctttaagtaaaggacaaacagagaagtagcactgagtcagatttttgccgctggtcttatgcaggtgacctgtttttcttaatgctccccacacatgggatctgagccagctgagcccagaaacctcccaggctgagaaggtagtgtggcacttcagcacatgagactgtacaggagtcaatacaactgacatgttagccacagaatccctgctaagagctctggaatagaagggatgcacagcaccccacctgcttttcctaatcccgtggatatcatgctccagccagccttgcccctggaatggagacatctcaggtaggggttgtcattgttccaagcttcgtttgatgccgtttcaatccagggtacagagttgccacatggagagtgaagccaccagaatacataagtgagaaatgaatggaaagatggacagatacctagatagatacataaatactttgcagaagtctgggacagtggaacataggaagagagcctcagatagggagaaaacagtaggttgattgtggtaaagggaaggcttcactttgttattcaatatacttatttattgaattgtttaaacaatatgtatatctttctaattaaaagagaatttggggccaggcacggtggctcatacctgtaatcccagcactttgggaggctgaggtgggcggatcacaaggtcaggagttcaagaccagcctggccaacatggcgaaaccctgtctctactaaaaatacaaaaaattagctgggtgtggctgggtgtggtggtgggtgcctgtaatcccagctactcaggaggctgaggcaggagaatcacttgaacccaggaggcggaggttgcagtaagccgagattacaccattatactccagcctgggtgacagagcaagactctatctcaaaaaaaaaaaaaaaaagagagagagagagtttgggctttagaataagactggagtgtgagtcagtcctagcttcctctatttctgagagttatgtgactgtgggcaaattgtttcagatctctaaacccgcaattcccttgtttatgaaatggaggtcttggggattgaatgagattaagtcctgtataaaatgctgatggagctgtcaataacatcagctttgcattattattatttgcattattaatagcattagacgaggctgagagtcagctacagaggagacctctgtgggcagaagagttcacagaggaggtagcaagtagtggtagagccagcaaggaatgggttccatttaatgcagcataaagtgaactcctcattagggacatgcacctccctcccttctcaacctgccagcacttgttttctcctcgggagacacctgggatggcaagcattgtatatggtaaggtggctaagagcatgagccctggcaccattggttttccattctagctgtgccacttacttgttccgagttagtttcctcatcagtagaataggaatggtaattgtaactacctcaagaattgtctcaccaattaagtgagttaatgcatggcaaaggcttcacaagaggctggcacagagtaagtgatttataaatatgagtgcatattctatactctggttctagagcaatcctaagactttcaaagaccctgaacactcttccttttggagatttcaccccacattttatcaaacatactgaaagtcacccacatttcacattaattattattgttattatttgctgtagtatgtttaaaagaggttttaatgattttgcttttagaagtgtttggctgtgactaactcatggctatgaagccttagcaatcgctggacatttttgaaaatcctttcgaagtgagtgattctaaggaataaattgtttttaagtgtaataaaatttttatgaacatcaaacttaacaattaatgatgtttatataacattccattatgtagacatttaattaagcttttatctattttgatttttcagttttatctttttgtattttgaagccccaaaaaatgtgttttcagacctcaggtaaggcaatagatgaaggcagtcaggcagggaccagaaagacctcttggccacccccctgaagctgtggttcagcagaatcaggcagagcctgggtgcagaagggacccataagcttatccatccctgttcttctattttatgaaagggataactcaggtccaaggaggggagtgacttgcccagaatatagtgcagtttggttctccaaatgcagaatcctgggccctttcaaacttgttgttgttgttgtttgtttatttgtttttacatgttccaagatgattttcaaggagtggctctcaaaacccaggggagtgacctcatgagaggtcaacgcagctgatgctgggaaggctcatacaggtccacccaggctgcaagtgtgtgtaacccaatgaccaaatcaacagtgacttgaacccacagccaggggagcgtgggtgaaatatgagcagacgttttcaccagctgttaaaacctagcaggggcattaggaatcaatcgcagactgtgcctcctgtgacttggcaaacctccatgaggaaggctcaagggattggaagagcagtcacaggtctccaccagccaagagcaaacctgagcagagctaagcacttttgtgccctctgaagcaaggcaaccccataaccttgcagagattcaggaatgatggaagctgaggagctacatggccatgtcaggaggatgacgagatcgccaggcagctgccatcaagttagggttcagagtggtcctgcaggagaaggggagatgcccctgcccgggaccacacaggacagaagggcatctggacagtgccaggccatgttcagaaagtgaagtgcctttcccataggaaggttctgggcccaaacacttactgagcacctactgtgtagctggcatattcaataagtgttaaaggaagggagagagagagagagactgggagggaagaaaggaggaggatgcgcccctggacagtacgtgctgtcactctgagtctcctccaaggccagtttgcggcttctaccttacatctttatacctttgaattggatgaaatgtattttctcttggtcattagggcactgatgcaaaatttcagtatgaccttgttggttctttccacctggtccttaaggttctgaggaccgtgtatgaagcagtatcatgcaggagaagaaggcaggcaaacctggttttgaattccagcctagccactatatagctgtggaattacagagacattctttaacctctctgaaactgagtttcttcatctgggtaatgggcactaagaaatcctgcctcccagggctttagcaaagtaccaacacagtccctgctacatagcagaggctccatcgattcagttccttttcatgtctcatggtcaaggtggccttgcctgaaactaagacatggctcattgtactgctcaagtcagaacaagccaagtgtgctttgggcaactaatgtgcctaagcctgggtcatgagagtcctaaaaaggaacagggtgtggctctggagctcagggaaacaaagagtcaaatgtgggggagacatagatttgaaaaaaaaaaaaaagagcccaggcttggggtctggagtctgggttatcttcctggctttgccacaaatttgctgtgtccttgattaagtcacagcagttctctgaatctcagtttcctcttctgtcctgcaagggcaaaacttgatggtctctaagattcatcctggttgagcaagtgctaagctgcatagcacaaatttcagatgcttctttaagtgtgtgcaagaagaacattctcagagatagttggagtgcctgggagcggctagaaaaaattagggaaatgatgccaagatttagccacaagtgatactactaacttaagaggctgctcctgatctcatgggggtcttaaattcttccctccagtccctctctcgtgggttgtattagaaagattactgcagcgactttaagcacaacaggttggattcagattagatttaaggagggacttccaaacaaatgcttttgaagacatgagcttgtaagtgaacagagagaaaggtatcatctaccttttagaagccttaagatgctgggcacaggtatattttgcattcctgaaaagctatctgctaagaaaatacattgactcaatcttgcttaaaatgcattggagtgttcactatttaaagtcatggggatgcccttaaattcacctgtttataaatacaagctttgttaaaccaggttcttaaagtgaagtttccctagctggatctctctcacaaaaagttcaaatgtaatctttctcagaggcagaaaaataaattcattttcaaggttcctttcagacctatgggtccaggaatgcatcaaatataaggaaaatgtgtaggatgtttctgtattggccaacatgcctggtttctgtccctggagggcctgcagagccagcactgtcttccttgagtatgtctcaatcatgaacaccaggcaaaaccacaggagcaatacaatggtatcattgttctggagagtttattctggggcttactagatgttgagtagaatttggaatcccatttgacttccatttactctgcactttgtactttgcagtaataagactgtcagtgccatgagggcagggactatgtgtgatttgcttctcattgcctggtatggaatgggtactcaataaataatggtgaataaatgaatgaatgaattaattaaaatggacacatcaattctagttgactttctggcctttagccagggacttaactgctctgagccccagtttctgcatccatagcatggggatagtaagagttcctactttgtaggattgtcatcagaattcaatgagacaaaatagacaaagtacttagcacattgtttagaacgtaataggcactcaaccaatgttagcttagtactactttttctgtgtaaaactatgttgtcctttccacagccctgtaaggagaagtataccattcccactgaacagatgagaaaactgaggctcagaggtgtcaggtgactgccccaggtcacaggtgggactgggactccttggtctgcctctttctactgctaaacagtctggtgaaatcacagaaagactcattcctggtaatgagacactagaggcaatgcgcgaggaagcctcaggaatatttggaaacccttctgagtttttcagctccccagagtaccctggctttgtggggtgaagtcctttgattgtctcaggttcctggtctgttcatgaccctgttagcccaaaagctggtagagctccatgtactgctactgttctttgtctccctgactctcccctgctccccacctgcattgccttaggcatttattatttccttaaacatgcctatttgcagagacacactgagctaagcagcaaaagtggaggtttccagtgggaagtccactgcgagggagtagggcgtcaggagaggtcctaccagctcaccttgactgagatgctcatatgctgtgcttttgaaaatgcaagcagtgcaagaacatttaaaattcacccaggggatacgttccctgtgtggaaccaagcaaacatgagtgcaagtgtgaaacatgacgtccacatgcacatagaaggacaaaacacagtctttgtcaacttgattatctaccctgtggtgagaaatgagggcctggctaaatggaacacagataatctggaaactttgttttgcaaaaaaaaaaggcacctaccccatttatactttactgcactgttattaataagaagcttatgaatctattagatatggtctttgccttccttctccattctaagcttgggtttctggggacagtgaaaagccccaaaggtgggaaaagcaagaggagggcaaacagaaaatctgcaaactccatcatccgaataacagggctgatggtttagaatgttctgcttgaaaagctggtgtgcatatttaaattacagctttccatacacagaaagggcagctgttaccattagcccagccccctttccgtcttactattaaaatagaggacaaaaggggtgctttcttttcctgggtttcttttttttttggtataaatttacaaaatgtggtttaaatattgattgtataggaacaatgtcacattttaagattgagtgttaggcgtggagctctcttgaagatggttaagtatgtattaaggccaggaaaaaagctggtgtgcagcaatgcccagcaatagagggcattcaggcaggaggggctgtcattcatcagctacccagtcaccctcataattggttcagggcaaaggggtctcaccttttcatgcttctctgttttgccaaaaatacttaagagagtgggggaaaaacctagtacgctttgtgtctctcaaagacaatgtgttttatcagcattagcaactcatagttggctaaggaatgaggcaggttcctagaatccaaatcaaacagctcccgttagtaaactactaacttataaagtatttaagcctaggactgggcagaaacaacatatgaaaatgtaggtagcattgcagaatattctgatgagtagaaatcatgtataaaaagcacaaactggctgggcatggtggctcatgcctgtaatcccagcactttgggaggccgaggggggcggatcatgaggtcaggacattgagaccatcctggctaacatggtgaaaccctgtctgtactaaaaatacaaaaaaaatagctgggcgtggtggtgcacgcctgcagtcccagctacttgggaggctgaggcaggagaatcgcttgaacctgagatcacaccactgcactccagcctgggtgacagagagagactccgtctcaaaagaaaaaaaaaaaaggaacaaactattcccaacaactctaggggagtccagaagatcattctgcagaagtagaactggtgtgatggcttgatgttaccaaaaagaagtttatggttcaacataaggaagaactttctaacaattctaatagtccacagggtgatggaatttctgattaggtagagatttctctctctttggaatcttgcaagcagaggtcactgaatcttttattgggaatgcttcacagaggatcatgcataagggtaagtgttggactaaaggactttagggagtccgtccagttctcaggtctccaactgtgtgttacttggccttgactagatattttactaacaggtgccatcctagttattccacatccttagagtcattgtagatctagagagatctagaagtagttctgtggaaaccaggtagaatgctcagagggcaaaataggaaatacaacaataggatggaaaagaggtttggccaggaaaagaggaaacagaagcacttcagagagctgagcctgcaatatttggaaggggtgcaaacagcttgtttggtttctgttgaggtccagataagagtaaataggttaaattaaattcgaccatgtaaagctagatcatcagaggcagagtgtcggatctcaggctatcagtccctcaaagaactgcctttattgaaggtggatgagggaacggtcaggttgaggagcattttatgcttttgtgaaactgatgaaggcaaggtctaccctgcctctctgagttcttttataagtacccatgataaatttccaccagtgtatagttccagaggaggaaataatgtagttcctacagaaagctgtgtatgccttccatgtcaaaagataaaacctctgtacatgggtatctttgtttttcttagctgttagagaattcagagacagatccttgggtatttacatctgctcatttatggtgcctgaaaggtgctatttctggttcttgtagcagatgaactcatttcaggccattgataatattaatatgtcttgtttttcagcctgccattcatctcacatcttttgggaagtgagtaggctcaaatctcatatactcaagatgaaatggaataaaaaggaaaattattgattagaaagaaacatgaggttctaagataggttttcaaggtggattggaggatttctatcacttaaaatgaccaataatggagggccagccatttgactcaatattcttggccatcattagtcacctgtacttgtgtgctaatattcgggtctctatattgttgtcccctcctcccacaatccatggttttactttccatggtttgttacttgcagttaattgtggtccaaaaatattaaatggaaaatccacagataaataattcataagttttaaattgtgttctgttctgagtcatgtgatgaaatcctactctctttgcctaggatgtgaatcatccctttgtccagtatattcacactgtacaggtatgcatgcataggaaaaaatcatagtatatatagggttcagtataggctatgaactgaatatatatactagggttcatagtatatataggttcactatccatggagtcttggaacatatccctgaggactaagaaagacgactgtaactatcatggtaaacaccccagtatattgcatgagtgagtgatggtagtgagacactgtttaggtcaacctgttgcccatttgcaatttcatgcatgtagggagatcagtcatatgtcctacaattgtcattggccatagatgagggggcataaatgggtagccccccaagggcaattaatggatcatcatcatctctaacatttccacacctaggataaatgctgtcagagttctggtatctgtgaaggtttgtggaattaaattaagatgaatggaatataattgaagtgacttgaactacactgaacagaattaaattgaattgcctagtcttgccttgcatcaggggaatgtattacctttgcctgctaatcaactctaacaacagtgcaagaataagtatagcatgctgagcataatgtttgaaatttaaacgtgttcattttaaaactattgactgtgcaccttttacattcaggcactgtgttggatgctgggaaaacatggtggactaagcagacatttctctgcctcaaggagctccacctaggaaaggagacaagcactaaacaagtcttgaataaataaatatctaattaaaattgtgacaagtgctaagaaggacaagtataaagttttttaagaagaatagaagccaggccgggtgcagtggctcacgcccgtaatcccagcactttgggaggccgaggtgggcagattactagaagttaggagttcaagaccagcctggccaacatggtgaaaccccatctctactaaaaatacaaaaaattagctgagtgtggtggcaggcacctgtaatcccagctactcaggaggctgaggcaggagaatcacttgaacccaggaggcggaggttgcagtgagccgagatcgtgccactgcactccagcctgggtgaaaaagtgagactctgtctcaaaaaaaaaaaaaaaaaaaaaaaaaaaaatggagaaaaagaatagaggccagaacttactagaacaaaccaacttgtccaacttggagaaagccagtgtgtctgagcagagtggtggctgatgaacctgggctaagggcttcacgctttattgtggctaagtagagatgtgagtaataggactgggtttttaaaaagtctactctggttgctccctggaggggagggagcaagattggaggcagaggacagttaggaggctattgctgtagtataagggagacatcgtggtggactgacctggggtggagagaaaaggagagagtctggccatatgttataggtgcagtcagaaagaacttggtcaagagttggatgtggccagtcagaaaaagtggtaaagatgtcaaaggtttccatagaggcaaccggaaagtgggggaggatggaggttccatttcccaagagaaagaagagaaccagatttggggtgagcaaaggtgtgaagatgaagaattccaactgagcatcttgagtttgagatgcctgcaaacattcacctggagttgtcagacaggtagttgtgtctatcactagatctgcaaatatgtgctgaaagcctaacctgtgtcaggctccatggtgggttagacaaagaggttagacaagatccctaacctctaggaacgtattgtctgttgcttgaaatgacatattggaaaatacggcactaaaaagtagggaatgataactcttagagagaaagagaaggaaatagggcataccataggagttgaaaggggaagagagcactttctgctgagatggcaagtgtcaaggtagacgtcaaaataaggagaaagggtatcgaggccagactggggatgaggcagaattctccttgcccagaacagagaaagccttagctcccctgtccctgcctggctatattctgcaaatacccctaggccaggtataggatgggaagtggaagggtaagggtggaagctctagctgggctaaggccaagggtggaagaattgacattttgatgcttaagtggggctttgggactctctttacagttacagttcccatccctgaaatatctactgggttcccctggaatatgtgtttcaggaaactacaccttctacccctctgctctgtgttcataaggtgctgtaaccaaaagagagtttgggaaggcctgaggatgctcttcataatgttgcctctttaaagtggtccacgtggggtgggtatcagtttatgtccatgaactgatgagatggatgatgacagatcccttattttctctaaatcaaattaaatccaacccacagcagccctgacctgacttggctggcattgacaggaactcaatctcagcctttgattaggcctccatccctctctgctccctccccatccagagagtcatacaaaagtccctggggacctatgcttagcagtgcattcatggtgactcctctggtcctaggcccattgtggtcactgctgatattctcattgtacaattgtgcatgtcccttagagctggaggctttgctggtttggtagtgctgggcccagggaccagccatcacaggggcacttacacagccgttcccctccggtgcacatcaaagcaggagttactgatctttgctacccagaatgttaacccaccccctcacccagtcttgggagtctcttttcaccctttctttgcctcagtttctgcctcttcctccctaccagcagcatttttccctcttccttccccctagcatcattcactcactacagatgctctctaaggccctggctcttatccttgagcacccagcagagtccccgggaaggctggttgaacatagaccgctgggcctacccctagatgctctaattcagtgggtgtggggtggagcctgagaatgtgcatttcaaataagttttcggatgctgctgctgcagctccagggcccacacagagagaaccactgcttcaaggggagggagcaaaagtcctaccctcatggaagtggcaggattgggggagggagaagggggaggagaattaaagaaaggttgaggtacaaataaatatttccaccaccttccctgccatctaccacctcctgttgaatgatgaaattctactgaccagaacataattcagatgcagatttgggggaactcatctgtgtgcagaggaagacccaggagaattacattctgtgctttatcctcggtgaccacaggccttttcttagcctggagttcaggacttctggattgggactcccggactctggcccccatcaggcagtttccagaaagttgctctgctcccacccccaagctcagactataaatttcttttctgttgccttggcctgtcattgggaagactggcatcatctgcagaatgtatttgcaagtaaaatgttcaagcagcaggagagaggcctgggagggggcagctagacgcagtgaactgtgtcagacaggtggctcatgggagctggcggccctgtggccagctcttctgctggaatagaaacccagcatctccgcctggaaggcttccttttgccacttttctcagtgcccagagaaagggccacccttgaaggggccatggtcaaagttggtaagccaaaagtcagcccttctgcctcatctcccagcagcagtactataccaggtgatcaggctggagctgccctgtcttcaaatcttattggtgccatgtagtagctgagtatagtttcagatgagctgcttctcccctcggagcaaaagtgtcttcatttgtaaaaggtgtataataatggcatctacttctcaatgttgcttggaggattcaaagggggaactgcatgtaaattgcttagctagtatctggcacatagcacatgtgcaaataaaggtgagtctccgtcgctcatgactattattctgttctgcatattggcattcatatctgttttcctcatggactttgagctccttgagagaaggagccaggtctgattcccttttgaatcaattcattcaatcgccaaacatctgttgaagccctactgtgtgccacttgctgtgctaggggcccatcatccattgctgcacatagtatgtaagtgttacttgatggttaatgagtgaaaggggaggattgcagagaaggcttacaaaagatacattttcttgaatacccactgtgtgctaaggcaatgctccttaaatttccatgggcctaatacccacctgcagatcttagaatcacattctgattcttcagctgcgggctggggcttgcagttcttcatttctaagaagctcccaggtgatgctaatgctgctggtccacaggccacactctgagtagcaagatagacactcctttgcattatgtcacttattgcttgcaaaacattatgggatgagcttagaaatgagaattcatagagattaaatagcttgctgaagatcacacagctggctagtgttggagtcaggtcagcatggctcatttttgtctattgagctcactcacccttaagagcagtggttcccaatgtttgccacatattaagatcacccagggagcgttaaacatcccaatgtcgggagagctggtggcaggtaattctaatgtgcagcagagtttaggaaccatggcctcagagtccaacctcatccaaggaacaagaaaggaaaggagaagaattttgacatctctctaatttcaggaaccaattatagactttcagaatttggaggtctaggcctcttttgatgttacagatgaggaaactgaggcctatagaggttaaaatattcacccaaaatcatttaactcattgatggcaaagttaggactagaactcaggcctctgggctctcacctttgacgtggttcctgtgctggaggaggaatccaggaacagattatccactggaaaaaggcttctccatgctcctccatcagctgggaccttggagactcaaaggagacctaggtttccctaggatgaaccagggaaaaatccactgccttccgaagagcaggaagttttcctttgcaatattctgccaatctcgaaatggcaatgtgcaacagaacatactttgaagttgtaaggcctttaaaattccaagatgaaatatataatcccattatggtaggagcataattggtggcttgatttagtgcagtaaggatttattgttttaatcataacataatgtacattggttggttgcttcataacaaagataaaatgggctgcaaatgtgtacagtaagattattttggggggcgggggttgaggaaatggcatgactcagagtttaaaagccccaaatcttagctgtgcctgtgtagctttaccacataacccattgataacttatccctatgatgtgctggtatgcttaagtgtaaccatttattgagcacttattctgtgagcagaatggcattatccacttagggaatgtaatcacattcaatctatataagatccccatgaagtcagcattacttacagaggcctgcacagcaataattggaggagctgggatgcaaattcacctgtgggtgaattcaaatcaccacactcagcataggacctggctccatacccttattttacaggtgaggaagaggaaggaaaagcaatcctggcacacagggacagcaagtggcaggacagagctgagactatggtctcctcactctgggacaagtgttgtttcctactacctccatggaaaatgaggccggaaagaatggccaggactccatgagctgttcccctccctactcaggctccagccatcatgcaatgaggaggttactttccacacagatcagactttggtctaatgtttttgaggaacctattcaacgaaagagagcccttcaccaatccatgcgccatcaaattagacttaaattaacacatgctatgtagatagctactttcccaatctgtgtcccactgattcttccatctgagaccatattatatatccattcattgagcaattaatggtgaagtacctcctatgtgccaggcactgtgccaggtgctagggataaagagataaggagaaagtaggacactgagccagtctctgccttcctggtccagaggtggacagagatagataaagtgggttcctgaaaactgccatcagtgccatgaaagtgatatgcacagggacatgagaactcagaggagggccctgaccacagctagtggtggagagaatcccagaagcctttccagatgaagtgatttcaaatacgggacctgaagttcagtagaggtgactatgtcaattgtttaaaaggtaggtagatacatgtgttggctcagatgctgaacaatgcttctggtaaaggcaacagcatgtggtcaggctgtcagaggtgatcagaatatgatctggatgtgcaggttggaggggaattagtataagttctgtgtggccggatgataaagtttaaagggaagagtaggaagagtggaagaaataaggctgaaaagggaagagggaccaggtcatgcagggaaccgaacaccatgctaagaggtttggattttgactctgtgagtaagtggagtctattttagtaggattgagatttagtctcatttccattatagagagatcacactctgactgcaacagggagaattgattagaggggccagagtgggaagcagggggtgcgtttaggaggctactgcaataatccaggtactgatgatggtagcgtcaatcagtgcagtaagagtgtagggagagaaatgaacaaactcaagacaaatttcttttctttcaagaaaaatttctaaatccccatggcttgtgatttattgaatgtgggaggagcgagagaaagggtggaacaaaggactatggctggattactgtcctggccaaagtggctggttctgagaaggagcacatggggaggaggaagaaaggtctgagaggggaaggatcatgttgacatgttaatatgagctgcccatgaggtggaaatgtccaggaggaagttggatgctggatgcataagtctgaagcttcaaggagagaaaaccttcctggaattctctttacttatcagaaaagatcccaaagctgacaacactttgtaatctcatgagaaatggccaaaagaatgacagcttgaccccaatcatgggctggttgtttcagcttgtaatatggctcaaggcattcagctaagcttcagtggccctgtgggcactgggatagctgagaagacctttgtcctttaaaatcacagcaaacgaggcagtccttttaacctctttgataggagtccagccactcccctccttgagatatttttactgagtgctttctatgtgtcaggcattgaggatacaggattgggaagaaggttcctgcccttgagtttctccagggccagtggggacagacacatgagcatatgattaagataccacattacaggtggaagaaacattggggggtcaatgttcagggggcccaagtgttcttcgacttcagcatggtaaatatccctatggagttcgtgcagatacttgtgagatggtttttgtttttcattttgatgaatgattgcaaagctcacaactgcagagagactgagtcttcgaaatcttcacatttttcaattttatcacaattttgactcccgctagttattaggaagggtactccctgggtcagctcacttgatgctgtgttaatggtgatgagcaaaataaaaggaggaagaattgagtgtggttagaacacaaagatggactgccctgttctacctggcacagggagaatagagaaggcttcccgggagaagaaatggcacttgtgtgagtctttaaaaatgaattatgcattttaggaggccaaggcaggagaatcacttgagtctaggagtttgagactaccctggataacatggtgataccatgcctctacaaaaaattttgaaaaatagcctgatgtggtgacatgtgcctatggtcgcagcttctctggaggctgaggtgagaggattgcttgagcccagcaagtcaaggctacagtgagccatgatcatgccactgcactcaccctgggtatcaaagtgagactctgtttcaaaaaagaaaaaatggccgggggtggtggctcatccctgtaatcccagcactttgggaggctgaggcagatagatcacctgaggtcaggagctcaagaacagcttggccaatatggtaaaacaccatctctactaaaaatacaaaaattagctgggtgtggtgtggggcacttgtaatcccagctactcgggaggctgaggcaggagattcacttgaacttgggaggtggaagttgcagtgagccgagatcacgccactgcactccagcctgggtgacagagtgaggctccatctcaaaaaacaaagaaaaaagaaaaaaatgaattggacttcatttgtgtcagagagagcatccatggcttttgcaaataccaaatagtgaagagaagttgagagcaggtggtatgtaggagagtggggagaattcagagtggacagctttgcatgccattctgcggaggcattccctagaggggagtggcggaggctgtaggaaaggtcacacgtgcagtgcctacagggtccaggcagataacaacagtgagagaactaggtggggtgaccaactgtcctggttacctaggactgaggggtttcccaggaaaagtctcccagcagaccaagatgagttggttaccctagaatgaggccaggccttgcctgcctagaaagggcctgctctcttcagggggcagctccttggaaatatagactgggattgctggatcttccaaatgtccaagagaaactgaatatccaaaattcaatgcaagttcttctggtttttaattgttgacaacaaattcaaatgttttaaaaacatgatgctggtcaaaccaagcatttctgtgggctatgtgaggcctacaggctgcctttttgaggatctctggctacagtgatgtaagtgaagcctcccatgtcccaccctgttactgccctgaggccccttaaaggcatgttcagatgattttcattatgcagagtgacttcagtgatcaatcgtttggtttttaatttgatgttcttaaccagatttggatgccgtgcacagaatgtaatggatcaaagtggcaatgaatagtggtaatagggacatgcattccatcttttttttgaaagacaaaataattgctcaatggcttgttctgccccaaacctggatacctatttggtcagaaaagtaaagaagaatgtatttctcaaatatcagccttaaggttcatttatcctgggcatctggacagccccctggctgaaataaggctgggaaagaacaatcactttgtttgtaggaaacttggaaggtcaggggactgctgtttgaaggtggtggagggtgatagagtcaactcaacactgtgatcatatgactgggttgtaatgtgactatggggaaaccacccaacctctctggtccatggtttccccatctgtgctgcagggaggctggcttgcagggtagttcccaagaatcatcctccccatcagctctctaactctaagctttaactttgattagacttttgctgggatttctctggccctgccagggtgaaataatcaggggagattttaaagaaaaaatcagtccagacaactgtgacatcttttttcttttctagatggaattagtagatatggggctttaataagttgatctgatatctgggctccaccaggccagctctctgaatggcatttttcattgtgtcagttgatttttctttaattgagtgtggatccgaatatacgtatgggagctgggtgcaggaagaaaccttcaaaggcaggggttttgcagtcagggagccatcctctccaagacaggggagggtggggcagcggggggaggacctgcgttcatgccaagctgctgtgtcacctttattaatgatgacggggagagggagtcagcaggcagctaatgcggactgcagaggatggtaatcgggaggtgttgctaccattccagaggacagggaagtgggacaaatgtgaatttaagaggcaagaggtgaacagagggaaagaaaggcaaaaaaaaaaatgagtatgacatcatctggaaaattgcaaaccaatgaatcaatgaagtatcattcccagagcaggaaggaagctgccagagaaggagccagcctgccggggagctggggcctgacaggaagcacaagctgggttggctatgcagtgccctagccaggggtcagccacagctggcacgtgagccctaggaatggacttccacttccttctgcccctttcctcctagagccttttttttttttttttcatgaaagacatcagaaggaatgctctatccaaaagggctttacaggagctcattaatgtgaaaccttggagtcagcttttcaaacagttatctctgagttcagcctcataggatttttctcatcatggggatcagcttcataaaagccagagtgtgatgattctgccagtttttgctgttaacagatgaaatagtactccctttatagaaatgaagagcaaggactttgggtagctttctttagttctcaagacctcgtcagcagagctggcctgaaggcaacacagtaggcaggtgcctgcatggcatcctattacctacaaattgaggatcaaagcccttagctaggcatccaaggcccttccatattcttcccctctaaatatctctcgtagttacccatgaacttctgctgtacccaggcaccttgttcatttccacctctgccactttcctcatcctgttccaacatataaatatgaagcagcaatttctcagtatatatactaccactccctgcccttgcccatggcagacatcactaattgattgccacactctttcctgctgagctaggacttggccttagaattatttccaacacaacttcccagacagtcactaccaatcaattaaattaatcaaattataaaataaaatgtattttctattattgatctaagatgtcctttcccattcttagctcaatctctatcaatcttgtagtttctcaaatcctacatgctctatgaaattttccctgaatatttctaccctcatagattgttcctgcttattaaaagcctagtgcaaaccttacctatagcatgcattttgcacttatcatttagtatcataatgtatcttcccctttatggatcagagcttctcaacatcagtgctagtgacacttggggctggatcattttctttgtgggggctatcctatgtattgtaggatattttagcagcatccttagtttttaaccaatagatgtcagtagcaacctctccatcacttttgacaatgaaaaatatttcaaggcattattaaatgccctttgagggacaaaattgccccagttaagagccactgtgagacagatagatagatagatagatagatagatgatagatagatagatagatagatagatagatagatagatagatagatagatgataggtggataaaatctcccctgttagtctgagaccttcagtgtgtggaccatcatcatacctgacatagctccttacacacaataagtgctaaataaatatttgataactgattgattgattgggagtgaggactgaggaattgtctaggaagcgggaaaaatgttctccaatgtggactaagaattacaccttcagtgtgtccttgctgcagttaagcactgcggaattgagcaatgcagagtttgcaaaggggccacctccaagcaaccacccccctccccaataagctgttagcagatcctagtacctgagtgtgctgtgactagcagatctcttgcagcagaaacaactagaggagggaggaagtgctaaaagaggcctggatgatacgtttggcttgaagtttaatacatgatgtgagagaccttcactcctcttcactcctcaagaaggaaaacgaggtaaactgaagaaatccttttatccgcaaagtaatcttccctcctggaagctctctggcttggtcacccgatgttctgtgaacatatttatctgcctgccccctccactcccttaaacaatagaggctttgtaaagggagaaaaatggaagaaactataaatcctcacccacaatgcagctgccctcatttccacaggggggtttaaatcatcctctacaagtgaaccagaagcaaactctacacatctccggctgatcacagactgttcctggtgaatcaggaatggaactgaggctgagcattgcaagaagtctttctgaatacctagtgtgtgccaggctttttaagggaccctctgcatgtgtcttctaccttcatcctcactacagtcctacagaacctgcatggttatccccattcacaaagagagaactgagggtccaagaggtaaaataatttgtccagagttccagagcatgtcaaggagagctggcattgatcccaggacttaggatgtgtccagtgcctgccggaaaagctacatctatgagaaactagatatatttcccagtatgcggtattggtacctcatacagaacccttcttagccttcaaatcccaagtaatgcagaaaacaggaggggtgtcctcagccatagagaatagtcattaagagggctggttctgtctatgtaactgtgtaactttaccaattggtctatctgtgtatatcatctagctagctttatccatatgtccatacatccatctattcattcattcatctgttaatttatccatctgtccatccgtccatcatccattcctcctcttctatataggcacaagagatgtcaatgatgtttcctaatattcaaggttaattcagcagggggagaggtggtgaggtggacgatcacacacttttcctttcttcattgacttttgaggtatggcttaattttaatgataataagatcataccatggttgcaaaaatgatagcctcctttttttctaaattaaatgaaagcattctgaagtcaagctgatctaggcaacctatatcccctctctgttcgttggttttcttatctatcaagtaaaaatggtattaccaacatctactgaaagtttggaggattacataagataaagcttacatagtgagtgcttgacccatagtaagtatcctataactgttggctattacgatcatcagtgtactttttaacagcgtctaacacataaacatctgactaatactaacttctctttcttctggttttttcttcctttgttatggccctataaaaagtcctttcagatgggaaatggaggcttagcctagtatctaacatgtatttagcccttgaaatggtgattattattactgttgtttagcccacagtacctcctgtcagagacttcacatcctgttgggacacctttacccatagaaggttgaccttggtgtcattttaccctggatgcacatgtttgcaggaaagagtgggagcggagctgcttaggatccttatccagagctccataccctagcaatgctcctggttttgatttttctcagggaggtgtgaactgaggaatataccgtattttcctgcacagcccttcctgagatgttcagtgtgaggcacagaagcccatcgttgttgtatacatggagaataaatccttgtttctgaacctgttctttttgcaatcatatttgtgacccccctccccccgacacacacacatgtttccatggagagagttagaaacaggataattatgttctgtgccattaaaaactggggtatcctgaatgataacccctctcctggcaagcaggcttctcaggtaggcccccagacttgaatggctttaaccagagactgggagcctccaaaagtaggcttctgttcattcaactctgcatgacagggagatgagcccactggactcaaagataagtggaatcaatgtaaaactaaagtccatgcccacacctgctgaaggagggccagattctgctagaaaataatcatttagcaagaaatgcttgctgaagagtgacaaccatcaggaatgaggaagagtcaacatttaaaacataatttgtgcttttcacaaactcctgaccctaggaacaactccagtctagtgccttggagatgggctggtgtagaaagacatggaaaatgcttctctaaagaggagagctttccagcacacagcagctacagcatgtttctcaaagtccaaatcaatggcttctctttgtacttacaagaaaatcctaattcttgcactgatcccatgggcctccaagggcccgtgggatcagactgctgcctgtctctctgacctcatcatatacggagccttccctcagtcatacctttccaccacactgaacttctttcagctcctccgacgctccaagcacatcccacttcggggcctttgcatctactgttctgccagatttttgcatgacccattttcactattcaggtttctactcaaatgtcaactcttaaagaggccactatgatccatcctattgaaaatagggcagatactccatctccatgctattgctttgtaatatttcattagtggcacatatcactatctaaaatgatcttacatatatatttccttgtttaaagtgtgttccctctgttcctggctcttcccaacggggatgtgagcttcttaagaacaaagcctttggtaacctcagctgtatccccagcatctaaaaccatgcctggcacatagtaggtgctcaagaaatatttgttgaattaagaaatgtgtgaaagaattatctcactctggattgctagaatataatttaagatgggatgtgttcagaggtagaacaaaacttctttcatttctggcctctcctaaggcaaaggtagtcaacacaggaccctaacttttcagcttttatggagggggtggtccctataacattcttttggagatgggaaattctataataaattcaatctcccatctaacaaatatttattgaacccatgcaatatgcaagttcaactctagcttctgacaaagaacaatgaataaatggacacaaatctctgcccatgagagtgctgatgtggaagacgtggcgggtttttaagagaacacagggcttagagtcggaaaggcctaaattttaggtcctatgtcaccatatactaaaagtctgcataagcaagctacctgacctccaggtatctaactttcctcctgtataaaatgggcatgaagctgacctcatgagattactgacaggattcagtaactgctgtgcctctggcacctagcacttggtggtcgctattgagatgatgaatgtagggccctgggcaaaaggaatgaatgaatggaattttctttccttccacttccccttgtgattaaacatctcatcatatactttagaagttttcaagtgatctcaaaaagaaaaaaaagaagaaaatttaaagtgatttcacatcacagagccacaagcacaggctccaaccaggatcagaaggtgttagtttcaaatgaagagtgtgtaatgaattcaggcccctcttcgagccttgattcaaagcagcctgcgcttctggccccttgtctgtgcttaagagctgatctgtcattaatgcccacagcgtcaggcaggggtgcacatggctgactctgccggagttgccatgttgtacagatggaacatgtcagggcacacccagcatatgcaacatccaagtggcatctttctgttttcctgtgatgctatgcctttgacatgtagcaggccacatgaaccttgcggatcaaaaagcttcttaggaaagaaggtgattcagtttattctattgcacagcaggatgtcctgggtaaccaaagaatgtcactgcacgcaaagacagacacaccttcttaaagccaaacaactggggaactaagttttcgatgaagacagttatttttcaggcttctgaacaatttggacactgttgtcacttttcctacctgccagcaactgttcctgaataaaagaactgtcccagcatgctctgttccaagaggcacacactggacttactgaacagtggcatgttgttaaccaaaagcatgttcagcggcagaggctcttagctgttcatcccaagctgtgattgggagtgcttgatgtgtccatagatagtcacgggtaggcggagtcatcatttcctctgtccaggtcaggaatttcaatgagctaatctgcatagcttctctggacttgagtcagcaacaagacaatactaataatagc[450 bp omitted]caccacacagacagcaccaatttcatccaagaataaaatctgttacataaccagatggcagacatgggggtgaatagagaagcaacctgtgagtgcattcggccactcctagtctccaaaggacagctcctagaaagaacttttcatctgtctctgagcctccctcggcaaactttccttcatctcctctcactggtgctttctatattttattttattttggtcgtgcgcattatttgaagttactatagcaacgtgtcaccagctggtatcacatagtaatgttggcatttaggtagcaagcttccgaagttggctgtttcactccctctgcgatctcatcactcctactaatcttaggtgagtgagggttgcatgggcaggcagcacccatgcccctcgcccctattttgtttgtttgtttcccaaggcaaggcaaactggtagcctttccctcagttcacatggcactgcaggggtcctggctctgtgtatgtgtgtgtgtgtgtgtggggggggggggggtgtaggtgtgtttgcattagaggttgttaaatagatatgtttaagttgaatgttgtacactaaaattattggcattgtcaatatcatgatgatgatgatgatgaattttttaatgcaaaagagtggaatgatttggggagtgctaatctcctgatcacaatcacctagtatcccagctaattaattttgatcacacaatactgggtttctcttcttctctctcaccatcacacagtgaagagaccctcactcttttcctttggagcttccaagtgtgcaagacctccctacgtcccgaagggctgaattaattaagaggattgattgtcttggatcactgaagagggttctgtacagcaaataagccctgccactcaaggtgttaagtagtccctcatcagccaagtgcctgcgatgattgcacttatttttacacgtttgacctagtttcaaaccgtgtctcttcatgctgtgattcattagccacattttaaaccatcccaatcggagcgaggtgacactgtctggtttgtgccagagtctcagatacaatttctcactggaatttaatatgcaagtctccctggaattctgttttaagaagcaatttcccatcctggcatgctgcttggatatggatgagtggctgcctcattcctaggtagtaaatatgtcgattacagaatttctgcccgggatgaaaagagggggattcttgctagcctggagactgcaaggggtccctccacccctctgttccccatgcagtattcaggcttttccaggtttctgacagggctgggagttcgagctcctacactgtaaagtttgaacaacgtcagtgttagggctgtctaagttgctagggcaaatgcagtctgctcaacattcccccacccctattcctatgtcccctaaaaatttaagacatggtggatatggaagtaaggtctcaaacttgtacagaggggcaggacacaaatgccatttttgaggaaactactgaaaaagagacacacatcagagaagcaaaatgttattccatgattctatcgctgtatgacaaaagaggtggtttttaaaatccaaatgacagaaaggagacttttctgaatatgaagctgctgcttgtttctcactccatttcaggttatcaatcattcacatcggtgtgatttcccacagatctgataccaaagggggctagacaccatagcagaaaaaaaagatgcttctagtcagaagtaaaacactgtcatttttcattaacagccaaatgcaggtaacttgtccaaacttcagtcacattgcactacaaatcgtaccaaaaggcacgcaaccgggtttttctacgtggtagtgagaactaagaaattaacaagctggtaaaagtaattttgattgatcagtgaactacaacacaccgaccaactcctaatgaaaagataatggtttttttcataaaacagccactctctctagatggggactagaatccccctccctttttatcttttaaaatgaagaatggaagtttctctaaacaaggcttaagacaattcatccttttcaaggcaattccaggcaacttgagatccaaggtttgtttttctttgctttttttcccccttcaaattcaaatcaagccatttgaaataacaagcattccatatccatgcatttggggcagcctgcagttctgacaatggtggattttccactacataccaccacacacacacatacaagctcccagtctcactgttgatttaagccaaagctttaaaagtaaactattgtccaagagacgatcgcattttctctcagaggatcatcgatcataaaaaataaaacctacccacatctcttaccttgaagcagtggaattacctgcagaggatggtcccccttccttgcacaatgagccaggctttgaccagcagcaaaattactccaaaagaaggaataataagtccttcatattgtaattttcactgtttatatgcaagaagtgtagtgggtctgctcacgtaggaataaataaaaagccgaacaaactgctcggcagctaccatgtgaaaagaaaagacctctagtggccacaggctgaattctttaaggaagggagaggagagatggagcagaggaaacacacgctcctgtgtgtgtatagacacacacacacacacatatgcaggcacacacacatgcatatacacacactcctacaccccacaaatgctaaggtttctcctttcttgcatttggcctggctggaggtagaaacgagaataatggttatttcttgatttaagtgggagctggttaaattagcagtgacggcggtgttctgtctagtttgaaagggataatttcacacactcactaccaccccctgggggcctgagcaggaaaaagaatttgactctggctcttcaaggagttgcctgccacccagtgtagaggctacaagttcccatcaacaaagcatcatcagccattgtccctgagagtcccagctttgtgatctccgccggatttgcatgttttctagtcatttacggtgtgtgggtgtggtggtcacttggcagggagagccagcttcctgggtttgtaagcttcgtagtcatgacagaccccttgcttagaagggctccatggctgtttcaaaattctgaatagttttaaacaagggctttgcatttttactttgttctgggactcactaattacatagctgttcctgctgacaaggaaagcatgctatccctaacttcccaattgaaaagaacctagaaacaaatgaaaatccatatcatgggagctactttcgggagtataaacttaagaaacagttttccaaaaggcttcctgtttctctaccactagaacgaaattgtaaacctgggaggaaatatatacacgtgtatatatacatacaggcatacctcgttttattatgcttcacagatacctgttttttacaaattgaaggtttgtggcaaccctgcattgagcaagtctcttggcaccatttttccaacagcctgtgctcacttcgtatctctgcatcacaattcggaaatccaagcaatatttcagatttttttcattattattatacctgttatggtgatctgtgatcggtgacctttgatgttactattataattgttttagcacactataaacaaacttcactatggcaaagttcactgttgtctttttttaagaaattgccacagccactctagtcttcagcaaccaccaccctgatcagtcagcagccatcagcatcaagcccagaccctcccccagcaaaatgattcctatttactgaaggctcagatgatcattagagttttttagcaatatttttaaattaaggtttatgttctcaaattaaaatttatatttttttaaacataatgctattgcatacttaatagactacaatagagtgttaacataacttttatatgcactgagaagccaaaacattcatgcgactggcttgattgtgatattcactttattgcggtggtctggaaccaaacccataatatcttcaaggtatgcctgtatatatttcatatttgttattttattaacaaaagaggaacttttttatataaaaaaggcagcagtttatggtaaaaatgcttttttttttttttttggttcaaacataatacttccagccaggccatcttccacaagcccgtgcttggctggaccacagtagaacttcatttggccaagatggcagccccagtggaaacttgcaagagacagtcaagaatgacttctcacccctggtggattcgtggctagtgctttgtttaccaggttccagaatagatctccctgaatgctgcttgcagacacagaaaactcaccctgatatggactgataaatctgggaaagaggaagcagaaaaggctatgctgatgtcttctggtgcatgaaagggtgtggttcctcctctgctcagagggtctcctctctgtgtccctgccttgatttccctcttctttgaatctttctggtacttagttggctttgccaattgagggtcttactctttttctctcatgattaatctcgctttcccaactagatcatgaactcacaaagagcaagagccatctcttctcatttctttcatccctctcagctcttaccaagtggcaggccccaggaggtgctgggttgccactggctgattcctggtgatccaactacagattccactgcagagaactttagtgcatttcaaggtgctaaaggagccacctgattcttttgatactgctctagaggtagattcagatgaattattgtcccatttgacagatgagacgattgggacttacacatgtaaaattatttgtcataaaatgaaactgtctccatgattttgaaataggctggatttcctgacacaagtacagtgctctttccccagtgtgcgaacagcaggagaggtaatggatcaggtgttatgtttatgttcggcactgctattacagtcccaggcacataatagtactcagtaaatactttattgatgaatgagccataaggagacattttctcacagggaagttttccatggtcctctctcaactatttatagtatttgtcttcatttcttgcagagtcactttgtggcatgtatgacagccatcttaaaccagatgggtgaccagcactactccttctacattgagaccttccagaccagctctgaacttgtggtgagtctgcaggatgctgggggtgaggaagaactcttccatctctggaacatggcttctgtccctgtcagagagacctgcctgtctatcacataatctagatatgacttaaccaatatttgttgatgaatcacagacattttggggtttaagagcatgactgttagagtcatacattcttaggtttgcatctaggatttgtcacatgctagctgtgtgaccatggtcaggtgaatccttttatgcctcagtttccccatttgtaaagtggggataatgtcatttatgtcatagggctaagaaggggttgcacgagaacacaatagctctcacgtagtaagtgctcagtaaaatatagctcttattaagatcacaaatgcctagaggaagttggtctctgggccaccttcttctagcctctcaggatgcatttgctgcaagaccatctgcccgtggcctgtggcttctatctctgcagctgatgacttcattaacatagagcccagcccaggctgttcctgccccaagggtggagcagagcacactttgccctcagtgtggcctcctttctctctgtcttgttgctaccaggttcaggagtcccactgcttaaggtcactctcaactctccctggagagaccaggagcaccaaaattggatcaacctcagagagtggcccataaaaaaaggaatcattagaaaactaatgccctaccctttcatccattcagtagtgagatgttctctcccttggagtaagattggcaagaaatggaacttttccctcaacctccaatttccctatgtcttaagacatggaaatagaaaaactggactcctaatttttgatcctgtatggaaggaaaggtttctgggggaagaaggtaagaaatggaattcttaatgattgaacatacacattttcttacataaccctcacaaaagtatgacatggaaattaggagtcacatttcacaactctacaatctgcttgctcaaggtcccgtagctagtatgtggtggaggtaaggtctggacattgactgtaacccttataccacactatctcctcattaagaagccactcttcccatctatgagccaggagccttcttcatttccacaggaaggggatgtgcctgtgatgatatccacacttccgcaggtgacatcaagtatgaataatataacaatactcaccatcatcatcaacaggtaatgagaatttgtaggagaccaggctctgtactaagcatgtgataggcagtatgcacttaatcgtcacagtcaccctttgaagtagatattattcccattctgctgacgtggaaactaggacttaaagtgttgaggtagttttccctagcaacaaagattgctggaaaggaacaaatgtcatttccagaattttgcaacttagctaaaagcagtgattttcaaattatgttcctcctatcctcactatgctttaccataaacatgcacacacgtgcgcacacacacacacaattccaccagagctgttctacctttatatattttatatattgggctccaggtaaggctttctttgaacaaagaattctgctgttaaaataatttgaaaaccaccaacttaaggaaacaactctgaacggatttcctctagattttaaattttgcctaaagtacactggtggtatgtcttcactacctccagctcaaaagggtctcagtgccagtggttctggtcttagctatccagatttctttatttattttttattttttgagacagaatctcgctctgtcaccaggctggagagcagtggcacgatcttggctcactgcaacctccgcctcctgggttcaagttattctgccacagcctcccgagtagctgggattacagtgtctgccaccacacccagataatttttgtatttttagtagagaccatgttggccaggatggtctcaatctcttgacctcatgatccacccttctcagcctcccaaagtgctgggattgcaggtgggagccaccgtgcctggcctccagattttgctttaatttgtgttttccaaagatggagaaaaagtatggctcactgcaaaatctagtgaagggtgctgaagtccgctaagaacctcttcaaaggagaggaagagttcctgtcattgtgtctcagctaatctgctcgtgtgtgtgtgtgtgtgtgtgtgtgtgtgtgtgtgtgtgtgtgtgtatgtgtgtgacatatgaattagctgtatttacagcactgctaattagatgttcattttaataagagtttatttgctcaatgacctgagatgctttcatacagtgagattatttccttctcaaatacatatttgtgaaaatgattataaaattgccacatcaatgagtacatttacttctttattcccaaagatggaattaatagtgctttattttgagaacattttcgcatcccatattcatgttccactgacatttgggaaacagcattccagcattcaatctttaagcttccatttaatttagttaatgaaaggctgtgtcccttcccttttcctccctccaaaatataatagcaaaaaaatttgaagagccaacaagctctgagttcctgtaaaacaggatgacatgtgtgctgtgcttcattgtttcaggacttcttgatggagaccttcatcatgttcaaggacctcattggaaagaacgtgtaccctggagactggatggccatgagcatggttcaaaacaggtgagctgctacctgcttccgcaaagctaccttacccagccctcacttcaaagatcacttattttgggttaaattagggacaatttctccttgctgaaaagaaattaaagtgttaaggcatgctttctttctatctttaaacccagggaaggactcctcaccaatcgaagctactcaaaaaatcgtctccaacttctccatttttcaaatcccagttagaatatcatacttcatctctgaagcctttcgttcactcttgggacaggagatcttagaaaagcattttaaaaatatattattttaatttttaaaaagtaataaaatatattctgtgacatggtaaaataagtttaggaagcattaaattaaacagatttgaacagatttccatgctgcaggacttcttcaagcttttaatttgctaatgtgatttttttctaagaggaggatttagggtacagcattccatttgcccatccatttgcacataggatgtgcatttggtgtgtctatgtgtgtatctataatacccgttaacatctcctacactatcagtgtaacccaagtatagcttagatgtcctatggcccaacacaacaagagataaaagtaattctaaacaatttcagtctctgctcctaggtttcttatatcatttcaccaaagtaaaatccaaattataacattcattaatcttttctaatattcccttgggtttatttctaatattccttggatttccccaagcctctctcagaacctgattctcaaatcctgccgatcagttcctttaaaacagcatctttttggttcttctcttttctttctccctgctttcctttggcttattttatttgttttaaattctttcatggaaagcccttcaacttatactggtgtctagttttatctccctctacctattgttcttgttttatatcaaaaaaccaagcattgtctggcaaagatagaaatatccctagagggcagaataaggggagaagttaaaaagacaaaatcagaattctctgaagtggaagggaaagagcaaacactaactcaaacttgcccaagcaaaaagagaatgtattggcacagataactgaaagagccctgaggtgtggcttcaggcatggatgtatctaggtgctcaaatagcaatgtagggaatctgtgtgtgtgtctctctctgctttttctatttacttgattctcaggcagatgctctcttagtggggaaaatgggctctagaagttgcagatatattccttgttgtattttcaaccacaatagaatgaaaaggcttcttttcctataggtacagaaaaaatcctgaggccactcttcaaaggtctggcctgagctacatgcccatccatggacctctgcggccagccaaatgaaatgtgctattaagtcaggcttggatttcatgacccgcctttggaactgggtcagttctaccaaaaccacaaagtcagggaataaggaaagaagcagagagagtagttcttcaaaggaaaatctagaagttgttaccagaaagaggactaaataatgggcaggtgaatgcacagatgtccagccttgatccagggtcttggggttggagccctggccaggcaacttccccttctgagctgtccacacggtccttctggaagaaacatgtgctgggtcccatgggagtgctttgaaggaatatttcctcctgaaatcccagcttcattcaaactttagtcatttttgggagaggcccccagaaatgatacagtaatccttatttctttatacctagaaaattagaatgtaatttcctaacggacctaatacattggaaatctctcctaaatagaaatcatagatttgtatctcttaagggtcagccaagtacttatgttttgtacattaaagaaaaaagttagactctagaacacagcctgggcttcagactctttaattctgccactttctctttcttgggaagtcatttaacctcttggagtgttagtttcctagtctgtaaaatggggataatggtagtttctatttcatgaaaattgctttgtgtgtacgaggatagaatgagttactccttagcacagtgccaggatcaaggaaaatatcaataataatagcgttgccatcactaggtgatgacaacaaacttagctttagactaaagaagcatgtgttaatgtcaaccagaaaagattgcttttttctgcttgcaggcacatagcttagttcgaagatttcctgcatcttctggccaaaatgatctcttatgtttatagaacacatgaaatgttctcactatttttgcattttgtatattataatagctaacatttattaagtaccgagatccatcactgttgcaaaggctttacatgaaattagttcatttaatcctcccaacaactttataatgtagaacaactataatccacgcattatataagaggaagctgaggtacagaatagataagtaacatacttcctgttgcattgctgaaaagaaacagaagccatttcattgaaaacaatgctcttaatctctgtattattattattattattgttttatttatttatttatttttgagacagagtttctatcttgttgccgaggctggagtgtaatggcatgctctcagctcactgcaacctccgcctcctgggttcaagtgattctcctgcctcagcctcccaagtagctgggattacaggcatgcaccactatgctcagctaattttgtatttttagtagagaaggggtttctccctgttggtcaggctggtcttgaactcccgacctcaggtgatctgcctgcctcggcctcccaaagtaatctccatattattaagtgcattttgcccagagaggtgaaatgactctccaaggtcatgccactagtgaacaatttcaacccaatttagataaacagaacaggtaccatgacttatgccagaccagtgttccccagaataccattttcttttctccaaaaaggtgcaacttattcatgtggtcagggccaacttcacttgtcagtatgtctggacattccaactaacttttcttccttccttccatgatctgtatgttatgatagttggcctgtttttataatttttctattatcacttatgatttctgtgttatgtatgcattagtcatctattatttacttatctgtttgttggaaaagggagtggagttttctagattttaatgtctccccagctgtgtactgtttgcgtatgcagacatagtgacacatctcctgcaagaaatacttcctgttagagtgtttttctttttggtaagctgcaacacagtaagatctgatttacatgatgttgttaatttttaaatgatcaagttctttataatgttgtaaatgaacaagattatgcctagaaacctcttttacctctcttccatctgcacctcactctagaaatccaacattttgaggaggcttaggatttatgcatagccctaaagttaccctaaatgcagccaaccaccaaatatttattgaatttcatgagcatccagggttgtaggcaatggacaggccaatttaagctatggtcccagaaggcagagggcttacggtctagctggggaaacaataaatattcccatggaaatgcaagctgcagttgctgtcatgaatttggagcccagacagagaccagaggcagaacagggcagttaggacttatggctgcctggattcaaattccatctgagcaagatccttcaccactctagactctgttttcctcactgtaaaatgtggctaataatgatacctaccacaaggatatttgtgggaactaaaatgaagtaatatgtagaaagtagttagaatagtgtttgacacatagcaagcgcttcataaatgttagttatttttattttatatttctatttctatggtttgggtatagccaaactacttcactgaagcagcaaatctgggctggatcttgtctaccttttcatatggtagttccatcagtgtgctgatgaatcactgacacccattttcccttcatcctacctaccttaatttgtagtgattattcgtttttggggtccccacctcctccaatccatgtaatccagaaagaaagaaccgtcttaatgttttttttttcttcttctttttcttttgagacagagtctcactctgtcgcccaggctggagtgcaatggcacgatctcagctcactgcaacctccacctcccagattccggtgattctcttgcttcagccccctcagtagctggcattacaggtgcacgccaccatgcctggctaatttttgtatttttaatagagacagggtttcaccacattggccaggctagtctcgaactcctgacctctggtgactcacctgcctcagcctcccaaagtgctgggattacagacatgagccaccatgcccagcttacctcttcatggtttcattaatcagcaaagaacacctaatcctgacatccagctggctgcaggatcccgatcccagagcctgctgcatccctaactggaatcccaaattatgcagaaaatgtttccgggcacttggggtgaaccgtgtcctgtcactgagctggaatatgctgattcattcgaaccttttggcccatggagcattttgtgtgttgtaaaggaggcactgaaatgctctgtgggagaataggtatcccagcggctcaagaggagggatgtctgtgtctcccagccaatgcttttatctttagttctaaccagtagaatcaactacatcccatgaatgacaggggattgggatttggagtggccttttctctcccttggtgaatctcaccagatagggcatgtccgcctcctctcccctcttttgttcacatgatactgcctgtgggcatggtccacgctgtgttgtcacatgggagtattatcagcctcatatcctcctgccccagaacttcgaggccatgggcatttaaggataaccataacaacaacagctgacatgtactgaggacatctgtgtgcccaggcactgggcccctgcttcatgtactgcagctcatttagtcttcacacatggctccttttacagatggggcagttgagattcacagaggtcaaccacccagcccacggccgcagctcagaagagtggctgagtgggaaggtgaccctggcaggcttgcagcgcctgtaggactctgtgtgcaccttccattcctgggcctgggccagggagtagtacatgtagtgtgtataggcttattctcggctgcctcctgacaccaggatttgttctgccacatgaagagaagtaggaaactggggacttgagccagcaggctctgtgaggcctcacatggaacagttttgagggtagcaagcctgggtttggctcctctttctgccagcttcttcctactcacaacagctgacttatctgttccctgctctattgcatatggcttctggttcctcatggaatcatctgcccatggcttctgctcaaggctcagactgcgttctccctccttgtgggctatttgaaaggatggatctacttctgtccaggcttgggtatttccattgcacagtgctatatccataagaccacccatgggctgctggccagcccatacaagactgctttgagtcacgtgttggccctggacccagtcagctgtaggcaggcagcagaatgatgcggacaaagtgcgaagggctgcgtgcatggcaggcattagtggaagcatgccagtgccggaagttcaaggagccagtgtgtccttctggttaactgaaaacactttagagaaagacagacctgagtttgggtctggactcttctgcttctttgctgtttgaatgtggggaaattatttgctctttctaagactcagtttcctcttatgtttaatgggtataacagtagctcctatttcagtttatagaattaaatgaaataatgtttgtagaactgttagcacaggccatatgaattatggcaattgatgcttccatcattgtcattattaataaagtgagctcacggcttggattgaacagaactacagagatgtccctgtggacagaactgccctgtggttaaatacctagattctgcaggccgtgtaacttcatgtaaatcctgattttacatgtactggctgggctattgggaaagttacctaaactcacgtctctaaagtggaaaccatatctaactcagagatatgtgagcattagaaaaacaaaagcaacagaggaaagaatccatgcaaagccctagcatggagcctggcaggcagttgaaaaccatggttgggattgttcttcctcctatacagccgctaagcaacacagacgagacacagcaagtgctaggttgagatctgataacgaactttgttttcaacaattcaggttcattgttgagagtaatagagttgagtgtgttttcgtcctaacccactttaccatatgagtgcttaggctttaagtacaattattgttgttgttttgagacggagtctcgctctgttgccaggctagagtgcagtggtgtgatctcggctcactgcaacctccaactccctggttgaagcaattctcctgcctcagcctcccgagtagctgggattacaggcactcgccaccacgcccagctaatttttgtatttttagtagaaatggggtttcaccatgttggccaggctagtctcgaactcctgacctcatgatccacccatctcggcctcccaaagtgctgggattataggcgtgagccaccgtgcccagccaattactgtttttaaaaaaaaaacaagaaaaatgagaagaaaaatgccttacttttccaaacccaaacatgggcacccaaagttaagtgatattctgatttccagtgtgtggctatgaaagactctagagaaagggaggaactttgatttacctgctactaatccccatcatcagcacaggggcaaatcaattcgcggtcattaggctggcctttgaggctggagacaagtttaagctgacaaccaaaataatgactgttactggaatgactgatagctttgttggtgctgagaatgtgtgaaagccccctctttgatattgtattcaagtttctgagatgtttacatataatgtgacaggcactcaatgcatttccatctgggggatcagataactaatctttaaggagagaacacaaaatacaatgttgtttcaaagacatattggtgaataacagactaacaaaaccaaagaaatctcactttgtgacagcctgatggggtggcagattttgtgggatttttatttctgtttttgtatggtgctgcctgcctcaaaactgtctgctgactgatccctgtcctctgtctgccctgttgtctggctcttgcctttagaagaatgaagcagtccagaggggtctgaagccacctcagctagtgaccctgtgaaaaaggttacattactgctatttcacaagggaggagactgaaacttcaggggttatattaacatgcttcaattccacacagctggagagtaacaaagccagaaatcacatccatttgtgtgtgtgtgtgtgtgtgtgtgtgtccaaatcctgtgattccagtgccaggatacactgtcttccgtgttcaacagtcatgaaagtattttaatgaacacctggccctgcagtgcctgatgtagcaaatgctgcagatactccacccaccgactcttggaccacccaaaatccactggcagcttcagtgaggctttcctacttctttctttccctgggctttgtctggctacagagtgctcagctcacctgcaggacaggccagaagtaccagggacttcctgctcattggagcaactttcaatcagtgaggggctacagctaaggtgtaaataacccaaccttcttgttccctgggaggggacacttcttatatgcaaatgtgttctgtaaagtccaggtgtaggatatgagagaaagtcatagtcaaggacgttaccaaaattgtttccttttttccccccactctgagcaattggaagaatagaattgtccttaacttagttgggaagactacagaaagcagtatttcagggtgggtgtagggagggcaggtggccggagtttagtttttgacatgtaagcttgagatgcctaaaagttactcaagtatgggtatagatcatagagctggagtgcaagctggtgtttaggggagaggcctggatggatatacaaatttaggagttaaagtcatgtggactggggagtatgtgagagcatagagggagtctgtgattcccagaagagtagaatctaccaaaggagagagatgttactgagtcatacaagtaaatcatcctagaccatgatgaatgttgggaaagggggttgcaatgaggatcccttggggtacacatgggtgcagcagaccctgccctgcagaagctcatagtctgaaattagagatgcggctgcacacagacagctggatgtaaagtgtgctcataggaggggtgccagaaataacctcagagaatgggggtggtctcagtcacttaaggctggtgggatggtggaaaactaaatgaagaaggctctcgatctggaccatgaaggataatgaccatgaagaatcctgactttcagagatgagaaggcaagggacattctacacaaagaaagaacatagagagggatttgggaaataccagaaacacagggtactagcaagaaataagcctagaaaagaaggttggggtcccatcatgaggggagagactgtccagagaaagagcttggactcaccctgtaggcagtggagagccatgaagtcaatgattgatatgatggagctgtcctttaggggaaggagcttttcaggatgaagagactggaggctgcaagaccagtcagaagggcttggcaaggaggaaggagagaacaacatggagaggaagacacttaaggagaaatgcaaattgacaagtaccaaaatgttaaacatgcatgacatttgaccagtattgttattttttatttattttttttttttttgagagagactctcactattgcccaggctggagtgcagtgtcatgatctcagatttctgcaacctccaactcctgggttcaagggatcctcatgcctcagcttcccaagtagctgggattactggcgtgcaccacaacgcccggctaatttttgtatttttagtagagatagggtttcaccacgatggtcaggctggtcttgaactccagacctcaagtgatccacccaccttagcctcccaaagtgctgagattacaggcgcaagccactgcacccggcccatttgaacagtattattacttggaggagaacagtggagaaggggtatatataggaggtatttgatatacacagaagagtgatcactggagcattgtttattacagaaaaaactgagaaaaaaacccaaaaagatccatcaataagaaatggattaaactgtgatacatccatacagtggaatgctcttcagtgattaaaaaggatgatatatatctacattcattggcctgaaagaagtacacaatttattgttgagtaaaaacgacaggctgtgaaacagcatttgttgtttagccccatttatcaaaatgataccctgaaaatatcattcatgtatatacatgtagggagacccttgaaattatgttcatcaaaacatggatgacagttttcgttaggtgatacgatgtggtagcaggttgtttatttgtttgtttggggatggggggggtgatttctctttagatcttttctggatagcatgaattttcttccataagcttgtaatatcttaaacataagacaatgcaaattttcaaaaagaagtcgaacagttattgagttcttgcaaggcaaacagccccgggtctagagtgtgaatagttgttaatctgcattagctgacctctctaaatcagtaatttggcctttgagcctctctccaaagagggtaagggaattttagtctggcataaggacgaaggaacttaagggatcatgctcagacagtctggtaattttctgccctcttccagggtcttcctgagagctatcaacaagtttgcagaaaccatgaaccagaagttcctagaacacacgaactttgagttccaggtgagtataagccaccagagctacccttggagctgcccagggcgtctctgacattctgggctgattgctccatcagacacatcccaaaggccacagaagctgtcccagtctctccagggattcccacggggggttatggctggggagaaaattctcaggctttcaaccagggccttgattaaatagtcatcaactgatcatcatatgcaaatgtgacggtataatggcctcttatattaacaaggagatttgcattcattcattgtcagagtctgtaccaccttttaaaaatgtatcaccttttttttacttttctattctctggaaccaaaagggcagccagtcattgacaatgaaaaatgatttacaatcaaattctccagtacaactttgtggtttcctgattcctttgaaagtcatttttagtgctcagccaataactgggacctctaagagattcagggtcctaaaagtatgtgcctggggcaaacagaatgacacacctgccccaggtccaggcccaagaagcacaaactctgtgggaaagtccagattgcttcctctgcctggagatgtgcgagggaaggccccccacaaaaggatcccctccagggaagtctccgatccctagcatctatctcttccagtgggggcttagggggtagtaggcactgagctcatgaactggaatgatggtgttttttccttgctgtaggggtgggatgcccctccacacctgtgggtgtttctcgtaaggtgggacgagagatttggaaaagaaagagacacagagacaaagtatagagaaagaaataaggggacccggggaaccagtgttcagcatatggaggatcccgccagcctctgagttcccttagtatttattcatcatttgtgggtgtttctcgaagagggggatgtgtcagggtcacaagacaattgtggggagagggtcagcagaccaacacgtgaacaaaggtctttgcatcatagacaatgtaaaggattaagtgctgtgcttttagatatgcatacacataaacatctcaatgctttacaaagcagtattgctgcccgcaggtcccacctccagccctaaggcggtttttccctatctcagtagatggagcatacaatcgggttttataccgagacattccattgcccagggacaggcaggagacagatgccttcctcttgtctcaactgcaagagacattccttcctcttttactaatcctcctcagcacagaccctttatgggtgtcgggctgggggacggtcaggtctttcccttcccacgaggccatatttcagactatcacatggggagaaaccttggacaatacctggctttcctaggcagaggtccctgcggccttccgcagtttttgtgtccctgggtacttgagattagggagtggtgatgactcttaaggagcatgctgccttcaagcatctgtttaacaaagtacatcttgcaccgcccttaatccattcaactctgagttgacacagcacatgtttcagagagcacggggttgggggtaaggtcacagaatctcaaggcagaagaatttttcttagtacataacaaaatggagtctcctatgtctacttctttctacacagacacagtaacaatctgatctctcttgcttttccccacacttgctcatctaagttgttcagttcctctctgggctttcgcctctcagaagctgagcaacttcaggcaaggcctggactgtatccgtgcctcaagtgagtcatctgtaaaatgcaacaactaccctttctacttcatagggtttttccagaactggaatgtgacgaagggcttgctggaagaatccacttgtaaggtcccataagtttctgttcaaatacttcctccttaaagaggcctcccctcctgactcctccctgaggatcacccccactcactccacagtcattatgcaaaaccatgtggcttcctggagtctcttcatagcactaaatatcattagaactcatctttcttgtctacctgcgtattttctctttcctcccatagaacttaagcctcgtgagtataaagaccttgaacacacaacaactctatgctctgtacctggcacatagtaggtctccttgaggaggtgacgtctgggctgaggcctgtgagattcacccttctgagagcaccagcctatgagtagatgagtatttgctgagaggatgaacaggatctttgaacaagagtctcttgaactaccttgcattcaaatcaggcaactgagtgacaatgagagcgataataaaatgcgtagctgccattttctgatggttaataatacatgccagatctcacgagaagcactttaagggcattatcttttgcagtctttacagccaccctacaagttggccactattactaatattttttctgctctaaggaggcaggaagtaagactcagagataataaggagatagcatggtgtcaccgagcacatcaatgcaaagttgggaccagaacacagtggtggctgacaccaaagcccacccagatgactacagccacgtgcctgatatagactttcacccttgcagtgggttgactgcctgacagggtctgggtgagagtttctcctggcattataaatcttcgacacgggaacaaagcatatctctttagctggtttgaatcaggagagatgtttgattcccttccaaatgtggctgagaggcctgcaggctctggtcatgggtatgtttagggaagtttctgctttttgggaggggcaacttggaacaccatacctaggggccagaggtgacagggtttggtccatataactgcgagctagtttgttcatctctttccgtgggtatcggctattgcagcctcaaacttgctttcctgacttcactattttccatgctcttagatggatattttccaagagaagctcaacttcagtccttcagggcattcctttaggtttatatcctgttttcctgaaagaaaatctgtatttgagagatgctcagagattgagggtttcatacatgagaagtacgggcttgcaagctgagtgactttagacaaattacttcatctctatgtgcctcagtttcctcaacattaaatcaggatactaatagcagctatatcattggattgttgtgaggattaagtgaattcacgtaaagcatttagaacagtgctggggacatagcagccatttagtaagtgttagctcattataataatagtaattttattatttggataatgattatgatgatcatgcccctaaatgtgtcagggctgggaatgcatgtcagtccttgataaacaggacaggaggcctctttctggtcaccacaacattgcctggggctgtcacacccacaagattctgtaaaacagaagagtggccaacattacaaaataaagtaagtctcttttcctaatgaggcttccatagctatttattgaaaagtacccaagaacaggatcattttccaaccttatctttgttctcctacctcttcctccccctgtgtaagaatggatttgttctctgtaccctgcctggaacacgccttgtctccttcttacgggctcattaattatgcatttaatatcagcaggaacagcatccatcactgactgctgcctgtcttggcagccactgaccagaggagcagcaggtgcaatgagattatccctaatatctttcccagaactgtggttttgtgattcaaagggcagaaagtaagaagcttggtgactgccactctgtaggtgacaagaactgggaattataaaaatggtgttttctggttgcggctaagatcacttgcattccaggccctattcaggatgctggtccttggtgtctgcatcagttcatgtggtcagggaagaccaagagaggatttcaaattcaaatcagcaggtatttttgtttaagagcaattcttatgggcccagactattgcaacatgcttcaaggaactcagaagcaaagaacactgccctaccctcaaggatcttggaatcttgatagaaggctatacaaatccatcttccagcatccaggcttttgaagagggtgactaactttattgggcatctacttagaaaattttgattctcatcataatcttgtcaggttgtgatatacccatttccctggtgaataaactgagcttcagagaattgattgacttttctgttaaaggtcatctaaccaataaatggggctgctgcgattcaaccccaggcctgtctgcaaagcacatcctcttttcactcttctgctctgtttcttaggaaccgggtgcctctggattccaggagacagctctatttagatccagaagcactctctgccctttctagttcttactggcactgggatagagagcgctgagatgattggctggaagatgagactctccatgttgaaatctctgattggccctggaatcagagattatacttgggctccagaaagactctgtgttaggcagcactgtctttggtattgagatcattctctctccttggggatgctctaattggctctaggtgtggccatttctgcctaggccttgaggcatttttggattaccagcctatcctgggaaccagttttgatatcctgtgaaatgaaaaacttctagactatttctagccattagtagaggcatgagagccaccttggtctttataatgggaaatgtaaacagtgatgccaaaaacaggcgagggagagacacatacagagggagcagtcatcaaagccttgcaactgcccatagcgccaccacagggggactcatggtgggatggttggttccaccaggcagaacggtgggcacatgcttgggtgcagtttccccagccctgcctgcttcagcttttaggccccagacattctcttgtctgatatttctcacctgagtccacacctgggaccttccactccccaaatcagaagcatccccagagtggtcatgacagctgtgcctctgccctgcagaggagggcaggctgactgcatttcagcaccactgcatgctggttaatttttttttattgaaatttgggataaataatgattcaaggtcactgagaaagaatcctgattctgattaaaaaatcctggatctctctgctataaagactatagtctttataaacatcggatggaccagtgacaaccttaaccaacaaagctgaaaggacactgagaaaggagaagagcgatttcagcagaagagcagggtggtgaagaatacaagtcctggagtcagataaactggattcagatgccaccttcaccgttttgtagctctgtgatgtcggacaagatattgaacctctctgggcctcagtttcctgatctctaaaatggggagaataattatacaaatctcatattttttttagggaggatttaaccagaatgcatgcagtgtgcttggttcgttaatgaactcattcaaaaaataatttcccaagcacgtgctggctcagacgtgatgtgcgatactgtgtgaacaagagtgaatttaaaaagaaggttcttgcttgcttgatgctgacagccagtagaggagacagaaaataaattaattttgtttaaaatatgacacagatgttgtgaacagggtataatatgggtgaataatgggtgaatctactttgcttggatgaatggagaaggcttttgcaagactgagagtttgctagccagtgatttcctcatttagtccttacaaccataccctttagatactattgtcctcattttctagatgaagttactgagactcagaaaggtagggtaccttgtccatgataatggaactggtcattgaactgaaaccctggaaggcaacctgacagtatctataaaaacaaacaaagacaaaaaacaaacaacaactaaacatgcatagaccctgtgtcttagaaattccggttctaggaatgtatactacaaatgtagtttcccatgcataaagatgtttaaataaaggcgttgattacagcactgttgctagcgaaaaaaaaaaaaaattggaatcaagctaaatgtctataaatagggaatttggttaaaattaaagtacattgtcatagaatacaatgtagcaataaaagagaatgaagcagatctgtatatgctaatatagaaacatttgcaagatatattggtaagagaaaaaagccaagtgcagcagacttttaaaaaagatgtctgtacatacatttgtttatgcataaaaaaattctgaaaggctatccaaggaattgttaacattctcttctgaggaattagacttggatccaaggtaggatggaaaataactttctcccatttaatcttttctatcatttatttttttaactatgtgtgtatattacttttataattttttgagagttaattaaagtaactaaattctcattatacccactagcagtatgactttgggtggtcttttaccttatctggactttactgtttacctctgtgcaatatggtagtcagaacagatgacacttaaatttattccagttctaactctctattgtcctataatttcaaaatattaaattcccaatcggaaatcacctcatctcttccccagggcaaagagacctgtgcattttgctaaagacacactgtagcttcccctagtcagctgagctaggcacttagtagaaatatcaccagacagtttctagcagggcagaaagaaaaatctgggaccctttgaagaatttctctgacaatacggcaatagataaataaatattctcaggagcccagctgtattcgagtcattgtgctgagcatggaattagagatacaaataaatgggagacaaaatcttggtacttgtggagcttacaattggagaagacagggcttacaaatactccacaaccaatgctaccatcaacaccaccattccatttactgagcacttggtgtcaagcctatagtggatgcctcgttctcaaattattgatccagtaattacaacagtcctttatggtaggtaccattatgttgggtattttacaagtgaggagaatgaggctcagaaaggtcaagtcactagccaaaggcaacccagctaataagcaatagaactggttttcacaccctggtctgcaagacactgacacatgtgctcttgactaccagacagtgctgtcatgagaaacaaatggagcacaaggccaggtgcagaacagtggactaacatccatggttgcacacaataagtgctcctcaaatcaggaagtgatcaggcagacccaatatgccctgcagtctaggaaggcttcatgaaggaagcgggtcttgaacccagcttggatgtaagaataggacacaatccctgcaggtgtgagaaccacagtgagtgaagccatggagaccaaaatgctcctgtgatctccgtggagtctgagcagaccaggccacctaggtgggcagttgttgaaggagacagcactggggaccatggaaattgtatgagactttaaaagccaggtgggttcatttggatctgattctttgggaacaagagtgaagaaaggcttggggcagaggccttataagtattcagcaatatctagttgtgaccactgctcacctctaagagcgctacacagagccacatactgtgacaacctcctctgagttccagaagtcattcccacagagccccatggccaaaactgggcaggggctatgggtgaggtacttggatgtgccatttctgatccactaagaagatgaggcacagctacagcctcatggctcataaaggtcttccagaatggaagccaaaaccaaaacaaaaccaggtccactccatgagaattgaaacgtatgtccacacagagatttgtacaaaaatgttcatagcagcatagcgtcaatgctatgactcataatagtcaaagactggaaacaacccaaatgaccatcagtggatgaatagataatcgaaatgagtatatccatatgatagaatattattcaatgataaaaaaatgaagtacttccacaatggttgaactagtttacagtcccaccaacagtgtaagagtgttcctatttctccacatcctctccagcacctgttgtttcctgactttttaatgattgccgttctaactggtgtgagatgatatctcatagtggttttgatttgcatttctctgatggccagtgatgatgagcattttttcatgtattttttggctgcataaatgtcttcttttgagaagtgtctgttcatggaagtcagtgtggcgattcctcagggatctagaactagaaataccatttgacccagccatcccattactgggtatatacccaaatgactataaatcatgctgctataaagacacatgcacacgtatgtttattgtggcattattcacaatagcaaagacttggaaccaacccaaatgtccaacaatgatagactggattaagaaaatgtggcacatatacaccatggaatactatgcagccataaaaaatgatgagttcatgtcctttgtagggacatggatgaaattggaaaccatcattctcagtaaactatcgcaagaacaaaaaaccaaacaccgcatattctcactcataggtgggaactgaaaaatgagatcacatggacacaggaaagggaatatcacactctggggactgtggtggggtggggggaggggggagggatagcattgggagatatacctaatgctagatgacgagttagtgggtgcagcgcaccagcatggcatatgtatacatatgtaactaacctgcacaatgtgcacatgtaccctaaaacttaaagtataataaaaaaaaaaaaaaatgaagtactgatccatactacaacatgggtgaaccttgaaagcattacactaagtataagaaatcatacatgaaaggtcacatattttatgatgtcacctatatgaactgtcaaaataggcaaatccacagagacagacagtacattagtattcacagtttccaggcagtttgtagcagggcagacagaaaaatctgggaccttttgaagaatttctgtgacaatatagcaattgataaacaaatattttctggagcccagctgtattcaagtcattgtgctgagcatggcattagggatacaatgaaatgcaagacaggatttgggtacttgtggagcttacagttggagaagacagggcatacaaatactctacacccagtgctaccatcaacaccaccactgcatttactgagtgctcggtgtgtgccaagcctgtggtggatgcctcatgcttgtataggttccagggacagggtaggggaaggtgttggtggggagaagagggactgactcttacgggtagagggtttcttttggcgtgatgaaaatgttccaaaattagacaatggtaatggttgaaccccttgtgaatatactagaaactaaatcatacacttaaaaagtgaattttatggtatataaattatatctcagatttttttttaaaaaaaagaaaatcaggaatgggatgacagagaaaatgcttttttgatggattcattcagggtagaatagatactggcaagaggctcaaccatatttgatgtgtcttatgtgttagggggcatttctgaaattattctcacaagtaattgtaaattgacttgctttgttggatacctatttcccatgtaccttaattactcttttgctatcccctaaaatcagagatttctcactttcatggaaacactcatttccatgtcctgtggccacagttttctcttgccctggcttgttgtttcaaattcccatcttaaatgtgagaaggtgtaagctccggacataagcagaccaaagctgcacattttcaaagcaaagccctggagaaactgctaagtcactgggatgccgggaggaaaggcagtctgaggggatgtggacaggagacccaacctgccacatgtgtttacataagcaacgttgctacggaaacaaggagatttgattccaaatgttacaagaaactttggaggactttgaggaagggagtggcatgatctgatgtgtttttgtttttgttttgagatggagtctcattctgtctcccaggctggagtgcagtggcgtgatctcagctcactgcagcctccgcctcctgggttcaagtgattctcctgcctcagtctcctgagtagctgggattacaggtgtgtgccaccatgcccggctaatttttgtatttttagtagagatggggttttaccatgtaggtcaggctggtctcgaatgatctgatgtgttttaaaaggttcttctggtctctgcatggagagctgactttaagggggccatgagccaagaggccacttcactgaatccctagagcagtttgtttttttgggccctgggtgataaaggtccaagtaaagaaaaaagcattcactcaacaaaatgtaaactgcgtgaggccagggatcgctgtctgtgtaaccactgctctgtcaccacactgtggcaatgccagggcacctagcagatgttccagaaatatttgttaaatgcatccccagctgaatactgaccgtggtgtgttaaaagaaccccgaatgtcaatcagaaggtctgcgtgcagatcttagctctgctgtgtatacatcaagatgagagacttacgcaaaatactcaacctctccaagcttcagtctcctcatctataatagaggaataagagctgtcaagtgttgagagatgaaaggaagatgtatgagaaagttcctggcctatagtaaaattagattgcttgttttgcttctttcaaagactggaaccgcaaaccgatttgaaagtcatactctgggcagcaatgatgatgttatgttatcagtggaagagttgcctctttcatagtcttggccatctgcaaacacgaatgaacgtctttgagttaaggaggaaggtttcaatggcagtatgatttctctggctaatgttgcctatcctcttgctacatacactgttgagaggggcctaaagtgggtgggctttgttcagcaaaactgtctcccacatgctccttgcaggaccttggcatcttgcaataattgcccttgagcaccaaaaccctaggctgtatcactggctttcgtaccaaagaaaccactggaataaggaaaagcacaacagcaataaggctagcaaggatttttgagctcttactgtgattcatgtctttaaacacatcattttgtgtcatctttatcacagctttctgcagtgggtaccagagtcacctcagttttgcagacaggtttaccgaggctccgtgatgaatccatggattgtagatccatggtttggacctataatatctctggttctgtatcctgtatcaatattgccatcagtgtggctaatcttttgagcagtcaccatgtgctgacccctttacctgctctatttcactgcaggctggtggagtgggttagcaccaacagatcaggtacatgcaaaaatccttacaagcctgcatctcagctgggccagcaggggctgtaactgaaacatgcatcagaatcacctgactgcttattaacctgcagatttctaggtcccacccccagaggttctgattcagtaggtctaggcagcggccagagaatttgtatctctagcaagttcccaggtgctgctgctgatctggcaaccacactttgaaactattcaactaaggggaaagtaaaggcaaaatattttaagacagaatggattgcagtttggtcctccaagctgtcaggtgaattagggaggacttccagagaggcagtgaatccctgaactatcttacccttcgtcaccctctaattccagggcaagaaccagctctccacagcacgcagctagggcaaattatttgtctttcaaaaaacagaacaaagcacaaggacaaaaacaacaacaacaacaacaacaacaacaaaaaaaaaaaaaaacctaaaattctcctcctctcccaaatcctgttgtctgagagtggacgtggtagcgcctagagaaatccatccattgtcctcactttggccaggatgttaatttcagagtcagtgccagttagaaaattgcagtgggcacaattaaactggttcggcctctgtcttctgccatcttcataaattattcacactacccagcgcttatgccttcccgcttcagaccctctccataactgttctctgctctttcatttacagctgtggaacaactattttcatctggcagtggcttttatcacccaggattctctgcagctggagcagttctcacacgccaaatacaacaaaatcctgaataagtaggttgcatttttggatttcctgaagagggggaggtccatgagatcctctgagatggtgcctgaagcagaggtttttgttcctcctaggtatggggacatgagacggctaattggcttctccatccgtgatatgtggtacaagcttggtgagtaggcacacacatccagatactcacatctgcaggcaccaaactccttcttaaagaccatctgttggagggccacaggggttttagcagtgggagcatgaaataacagttcattactgtgtgtaccccagttcctaataagtgcctgattatactctgaataagaggggttccccatacccacttctacccccagccctgcaagcagctgtgaatatgcttctgcttgatgcccccaatgggttacagatccaaatggaaatttataagagggaccaggactgtcatgggaactcacgtgctcacacatgacacggatgcttgctgctgattggagggtccttctgcatcctgtatagcgtggtccacaaaacgtactccaacctcataaggagaattggctctctgaaagatgagagggtctttttagctgaaaagtgaccccagaagctgtctctgcctcagggagcttcaggaattctgtgtgattacctgaatgatacctgtggagggagagatggaacgaaggagacattattgagagtctgagtcaggcccatgctaagaagattatatttaatcttcacatcacttcctgtaagacggaattgttcccccatccttttactgatcaggaaactcagaaaaggaagtaacttgcttgaaatcaaacagctggaagcctccaagtgtggttttgattccacaaggacaggggctataaaccttgctcatgtcctgaatcctcctttataaatatgtgctgaaaggatggatgggtggatggatgaacgaacagtaatgaattttttatttttctgtccctccttgactctctgattctaaattgctctgccctgggtgtggatattgactttcctgcaagtactaacttgtgcccatctcttggatttaatttttgttccctcttcagactacgcttcttgcttccccagacctcttattatctgccagttcccatgggttttttaggcagcagttgcatgccccttccagcgagttctatccactgtgggggaagcatagagcagtggatagatgatcagtctgcgttctgtggttgctgatagcatcagactcgagctaagagaagtacatgctggataacagggaggttgcaggttggttcacaaagcccaaggcagagccaaggacccaagcccagaacagactgccacatctttgctttgggccttgctctgacatttacaggctgtgaggcctagcatcaccaggcctaagttggggaaataagcaccctcacagggggcttatgagggtcatcagagcacaagctggggcacgtggagccatggaggccaccacacccacatcagagtttttatcattattgtcatccttgccccatcaggatggaacctaatgtttctgttctccctggcctctaccctctaagatgccagtagcaccctccctagttatgacaaccaaaaaggtctccagacattgccaaatatcccctgggagaagggggtgccacctctaccctgtttttctagaaaggcatgtctttctcagtctatcttttgtttctccactctgggtaaggactgggatataggaaataattgacgtttcatttaccattgctttgcaatggtaggggaatgggggaacatggtgcaagcacaggcccacacgacagccggcacctggcctcagggtcaggaagatgagaaggagtaagggcctgcggcagagtgaaactgacatgcccaagcagagaaaaaagacagtcactgttcctctccagttaatagctgtcctactgaaatgcaatcccaacgttgtcatacctttcagtttttcaaaagaagccgggagactgggtttttcaatgtattttccaatttatgaatactaatgaaaactaattgaaagttttcaaaacatcagatgtgctcaacacatgatggacccagattcagttcacttccaagtttgcattcgttgctgtacaacagcagaggctggagaaagctgtggcgggcttccttccccagctcgacaccccaggcactgccagaattgcaaaacagggatctgtgctttgtttgtttcaagtccttccacatggcctgctcttttctgaatgtccttcattgccattgttttgcacacagaagattttatttagatatagattatgttttggcaggcattcctgcactcccaattatgctgatgaatgaaaagatgttaccaaatattccacctgcttagaatcacagaacatcggagctggaagggcccttcaaagatcatattgtccagcatttttcaaatatttatttttagctgaggaccaataaaaaaattctcctgcttaataagtaaattggatgaaagcagaactattgtaattgaagtgaggtgggagacccagagcccattataacaagctgctcttgaacttctcttgtagagggttttctagggggaagccctgagcactgcagagaacagttggaagcaactgatctggtccaattcactattttactaatgaggaaactgaagtccatagagaaggggtttgtacaagatcatgtagtgggttagaggcagaaactggtcaagcaccttagccagagtgtttgctctgaagcatcacagactccctgctgttagcaaaaacctgtaggatgaattaatgcaattaaaagatacatctgtcaggggttgagggttggttgcaaaaaaaaaggcattgactgcagctgccttaatcagagaaggtatttattagaagggcaagaaagagccgaagaaccaggcttctcttgttcctggctacctgaacccaggattcagtgttttaggattgcaatgtgctcaattaacaatgccttgtagcagttaacagccacgtgtcccaagtctgtcccatgagaatcagcagaaacatacctgttaggtctacaggaaagtatttttttccaattaaaaacaaaacaagacaaaaaagaggcaaggagaggacagattgaatgaacaaaatgcatttttgcccacagccctcccctctctttctttctggaaaaggacaatatggctggaggggcagtagccatcttaaagccatgaggacaaaacttacattctgagaatgaaggagcaggtctggactggccatcttttggtttcttgttaaacaagaaaattaaagcttcagtttagtcatggtagtcagatttctgttgcatccttaactgatacatcatctaattcaaccctgccgattttataggtaaagttgccagacgaggccaagagaagcagaaggacattcctaaggtcaaaaacaagccagtgactgaattgaggctaaaagagcctgtcctgtctcttgatcccaagtgcaatgttcttacaaataatttttttcaaagtgtatgcatattgtttcaaagggtgtgaaatgaccaacgatctacgctttttcaaagtgtatgcatattgtttcaaaggatgtgaaatgaccaacgatctacgttttttcaaagtgtatgcatattgtttcaaagggtgtgaaataaccaacgacctacgttttttcaaagatgactgataatgagtaaatcataatgcatgttagttttctaaattttgttttaaggccagaagcaatcagggcatcatcatcaccatcatcagtatcatcatcttcttctcatcaagaacaacttgagcaaccctgtgtttataagatagctaattgcaaagctataatctcaggcttgaagattatttaacattcttcaggggcaaatctagacaaattgtgtgtgtgtggagaggaggtatgggcagggaggtcttcatggggagaaagacaacatgtggttaaggagccagccactcaggggttaatggcatttgttgttttggatcccgggcggacgccaaatggaatttacttttcccagtagtgtagcatcgtaacatttgatttctgctcggcatgaagaaatgcacattttgctcaaaagactttgcacttaatcctcccacattcacttgggttaacactgagctgctgtattaacattcgttgtgggaaagaaggacacattctagcgcctggcatctcggcctcccatgtagggaggttggcctggccaagcctcgagggcaatttgtccattactgtttaagcatctacagagtgctcagcttggtgcggaggtccagggagtggagctatctagtagggaaaagtgacaaagtgaaatgtgtagtggggactcaggagttcaggccaaaagggatataagtgaggactataaggatgattccatgtggggaaatggcttctgaattggaaggaggaccatgtcaggactgaaggaaagacagggaaagggcaggtattctaggggagcaaccagcccagcaagcatggcttcctggggttggggagaggctgctgggaataaataggaaatgggattagtgtggccatccgtccattcatttactcattcgtttactaaccaacatcgagcactgtggtaggctccccaaagatgtccatgtcctaatccccagaacctgtggaatatgttacctgacacagcaaaggagactttaaggtgtgataaagttaaagatcttgaagatggggagtgtcttgggctatccaagtgggctcagtacaattacagcatccttataggtgaaaaacggaagctggagaaaatcagagtcagagagcaatttaaagaagctgtgttgctggctttgaagatggaggaaggggccatgaaccaaggaatgcagggagcctctagaggctggaaaaagaagctggggaaggcaaggaaacagattaatccttagatcctccagaaggaactcagtcttgcccagaccttgatttagctccatgcaaccccttttaggcttctgatctccagaagtattacacttattacaaaataaatgtgtactgttttaatttactaagtttgtggtgatttataacaacagctgtaggaaactaacacacacatcctctacatgccaggtactatgccagtagctggggttaaaacccgaatcaggttagagatatagcccctgacttcatggactggtgatcattgcactgaatagttacctactaactgcagcattatttaatgacagttgcgaaggggaaatagctgtagaatggaaacttggggcacccagagaattggtgacagactcctacttagtgagtaagccaaggatggcctccatgaggaagagccagaatccctgaattggaaggaggactatgtcagggctgaaggaaagacagggaaagggcagatattacaagggagcaaccagcccaagcaagcatggcttcctggggttggggagaggctgctgggaataaataggaaatgggattagagtggccatccgtctatttgtttactcattcatgtaataaccaacatcgagcactgtggtaggctccccaaagatgtccatgtcctaatccccagaacctgtggaatatgttacctgttctttagaaataggatacaagccttctaattataaatgctttagtgtctttatttttcaaaaattaaaagaataaagttaattttaacaatacatttaacaccatattctaaagtgttatactaaacatgtaatcaatataaaatattgctgagattttgttttccttttttgggtatctggtggattttttacacttgcagcacatttctaatggactagccacatttcaagggctcaaaagactcatgcagcttgtagcttccatacagaatagcacagccctagaaaatgagaaagggtttacttgcagagacatgtgttggggggggtagactatggagggggggtccaggagagggaaggaagaagagctcgttggtggaggaaggcccaaggtgggaaaagcagtgtgccctggaggagtgggcggtaggcaggtggagggagggtggctaggtgagaggcacacaatgggtatggggagggagcacaggaccagacatgctcccaggtagtttatcctgagagcaaggaaagtcatagggaaaatactctgtgaataaacatgatccaactggggcttttcaaacatctttgaggacaaatgagaaaatatttcaatgagacagagaagagtggagggttgtgagtgtcagccatggtagggaagataaatccatctgaccctttccccagttcagctgtttgctttaaaagtgaacaaataaaatgaccagcctgaaaatttccatgaaatgcttcagggagctccatggggttaggccttgtcttttcatattgcttaatctaaaactcggcatagagctgaacccaaagtacttaccatcagcagcagcagcaacagcatcaacacttcctgagcttttgcaatgtgccggacactgtgcagggcccttcgtttgcacttaagcttcgacaattctattaggcagattttattatcttcatcttacagatgagattatggaggctcagggaaggtaaatgacaagcacaataccacacaaccagggagtggcagtggcaggacctgacccaggctgtcagactcgaagactctacggggcctggaaggaagctgaggctgggcaagtcctgaacaatgaggagagaattgattgcctgtttcagagcattgccaggagggagcttttccaagcctaagacagaggagcaaagatcggtggatctgtgttctgtcttccccttttgaactgattttaggttttttttgtttgtttgtttgtttgtttttaatcagctcagctttatttcaaagtcccccggaggcttgctggactctgaaatccagggagtcgtaacttgccctcatccttgttcattgcagcgtctgtgccagcctttggagagacctttctgttacatgtcagcctcagaagcccatggcttgcccaacttaattctcagccaagttcacaaaagcctccctccctccctcctttctcccttccctccctccctccttttcttctttccctccctccctccttttcttctttccctccctccctcctttcttccttccctccttccttcctttcttccttctttccttcctttcacctttccttccttccctccttccttcttgtttctttcaaggtcatctcctcagtgccctcagatcctttgcattttaccctacagtccactcctgggaggagtgatggaggaggccactgtacagatgagaaaccaagaccagagaattcatgggacccctttccacccacacccccctgagctcttctctgtgcttacattatcagcagatcctctcccaaagcctgtgtaatctggcatttggatttttcctgctggcttattggcactttaatagccttttctaattggtatctgttcccagtgaagttcagcttcaattacatgaaaaagaccctcttagtaaatgcccttccttggcttttctcgaatacagcagcaggtgtgtctcttgcatgagcactttttttcccaagtgagtttgtattcaattagccacaaatgtgttctgcgtgcatgtgtatgcatctatgtatgtaaagatatgcaaacacatatgcatttggatacttgaacacaaaatccaatgtgctgaaattccacttttatgtaaatgaataacatttctgaagggagcattgtaagggccattgaggtcacactgtatttggagatcaccatctctctctccgctttccctattctgccaaatatctcctcaactgactgtaaagaatgcagatcaaaagtatttaagaaatcacgggtctacagcatgtctgccctttattttaaaccatctaaaatttatccttatcatgcccaatgccctccagtattctaaaggcctttgttgcataagcaatttctccattccgtggtggcttatctgacagtttcccatttaccttctacctgtttttgcacttgactttgaattttaaaactccactgtggtttgaaaaagacttaaaggatcttgaaggatgaaatcagaaacctagattagcaattactataaacctgccagaaaggaagctgttgttgttattgttttctatttgggccaaagcaaagactctgaggcttaagtgtaatccaaatgcatcatataatgaagcttatatcctggaaaagtgtctttatttttcactccactctgcctgactccaccatttcattctcactaactgaggatattcctaggatgatgccttttttattttattttaatctgaatcctgggcaactactccaacattaagcctcatttaggttgaaagaaaattcattttcttactgctttccctctcagctccttgtctgagctttaatcgcaagcagctgtgccaggccacacgccataccacctgagtttctgcaccctgaggtgctctctgccccaggcgaagaccacaaatgttcatcctgacaatggatgaaaccaggatgggtgccaaaactcacaaggagaaggaggtagcagctgatgaaatatagaggtgtgagcttcaataatagggttgcttgaatatgctgaccctcacttcccaggaaatccctgcaattcctaagtgctcctctttattccctatctgctacttctgatgcatattttctgaagattctgctcagttctgctcaatacggctcccctttatggttcattttgaccaaacatcacaaagataatattaatagctaatgctgtagaaagtgggctatgtgccaagcattgtcctgggcagttgctaaataatcactcattttttctttgattctttacaataaccttataagataaatactgttattgttccaagttacagatgaggacaccgaggccccgagaagggagacaaacttgatcaacattacacagctgtaattgatagtggagtcaatttacacactcaggccgtctggctccagagttggtgcccttaaccactgggcaacactgcccttggcactgattcttctgcgctctgtgctaagtacatgcggacatatttttgcaagatcttctcaacagctgggtatcacttttgcatttttatgagacatatatacaagtcccatagccagggaatgtaggagctggaaaatttattttctcattcagcaggtgtttactgatcatctgataagtcctgtgctcagtgctatagacacaatgaggagaacagacatggtctctagtgggggaggcagatgttaatcaaacgattcgacatataaagatatcatttcaaaattggcaaaacatataaaggcagtgcaaggaatcttttctagctaagggtgggaggtgtagagagggggcttttctcccagaggaaggagtgtttaagctaagatagcacccatctgggggaggctgcgtggtaatgggtattgggttagggagcagacagggaaaagtattctcagcaaaggggcataatgtgcacaagccttgctgtgggggaagcaaggtgaaattgtgacatttgagcaaccccagctaggctagaatgccaggagccaggggaggggatggagggaatgccttgaaatgaggcagaagagacgagaagttgtggttcatctgatcctcaagctatgttttaaatctccccgttccactgaccacactattatagcgagttcttagtagcaaattttgcttttctcatttcataaaacagttggtaaaatcccatttaaaaactctcagcaacacggcatgtatttcagacagacataatttcaaatgtgctgtgctttgccatctctaacatattcaatcatggccctatttgcagagcagacactgcaggtgaaaacccttgtaaacagtgaagtgctttctacacgcacgcccgtgttattagccttaataatcgggcttgttttggataatgcatgcgctctaacgggagttaatatatgttaagtgttcaaaacggtgcctggctcatggtaaacaactatataagtgttaactattgtttttactattatgcttccctttttttctttccccaggcttggtcggaggaggacctgtgcgtcgccgaactgttttatgtgttcatgttcctcttctctttcaggtcagaacaaaatctgcttcatcccaggcatggtaggacctatattagagatgacacttatccctgaggctgagctccggaaagccaccataccaatcttcttcgacatgatgctgtgtgaatatcaaagaagtggggatttcaaaaaggtaaaaaatgaggccggaaactcatgccagcatgcctaatccccagcccatttccccataatgatatcctcattccatctccctgagcttcattgagaggctcggcggcaggatagggacatttattcatgggtccggaatgagctggcagatcagatttggtcggtattctatcaagcttttccgtccaaggacaagattaaaatgcagtttctggctgtgtatttgcttagcctctttctcaagaatctaagaaccccacatctctacctaatgattccctaaaaatgtgttcccagggcccacccgtcccacctgtcccactctctcacccactcttgtctagtacttcatcttctgggctgactctgcggatctacattatctagaaaacgccggccctgctgggtgtcacacttgtccacacaccaaatctgatagcagatggagttagggacgtgttgctcaggagggacctgtggatctgtgagggaataggacactggcctcagcatggagggcgccagaacctctgtgaaacacgagagccattggccaaatattgtcattgaatatttcgtcaaacttggacaatgaggtccatttcccgggcctggtcacactgggagctctggcagtggaagaagcaccagttgccacaattggctcccggtactgctcagtgacattaccctgtttaggaaggttggtctttaagtcccatcaaggctgcctgagccgttccctcaggcctcaccccctgtcctctctgccccacatcctcagttttacctctaactgagcttctcaccctcctctctcccccagtgcatctacctcttattcctaccatatcctgccttaaaatgggtacttaaaaggcagcagattccaaactgcctttccttaagatccttagggatgtttcccttcctttacccattaataccctaatccccacagaataaagcccacaccctctagccagcatccccggccctcccggctccagccttctgaagaatgtctcagccatcctctccaactctccccgccttacctcttctccaccatccccgcagcccacctgaatggcattgcctctgtgggtgtccttcgggcattttttttctttctgctacttctctgcacagtcacaaccctgcctctcaacaccttctaaactcttactgatcctgcgaagcccatccaaatgccatgtcacctagaaggtcttttctccccattcctgttatttgatgtctaaggtatgactattatctactgccttgctttatactcatttctgtgcatttttcatcttcctcatctgcatctaatgatgatgatgatgatgattataatgactgactttagatatttactacatatcaggcatatgacacctattttctatgtattagttcatgcagtctttttaaactacaactctgtgaagtaggtaacattatcttatcttacccactttaaagatgaaaagaaactgagacttagaaagctgacgtcatctgctgaaagtcacaatcaagaaagtagcagaacaaaggctgcagcaagcaggtcactgcgattcctaaacccatgctgcaacccgtactatccagccaccagtatctcccagtaatactggctgattggtatctgctagagcagtgctttccctaaatatgtccatgaagcactgatccaacaagatgctccagggaagagggtttcaaggttaaatacctttggaaatcactgcatattggaacccatcttagagattcccagtgcatattaatagagtcaaggcactgagacattccatggcaaacagatctgtcatttcttaaatttatttgtgcaagaaacatctattggattttccatcctattaatctcacatgggagaaagttgttctgagaggaataagagactagtttgctatgatgatatcactgtgagaggtagcattatagggactctagtgccagaagggctagtggccagctgcctttttgtgaagagcctgtaaagaaatctggctgagtaggtcaaatggagaaagaggccgtatctgagcagttgggatagggggagtggaaggtgaaagcttggattgagtgtttgaaggcagcttggaatttgctgccttttaagtgggagcaaggtctgtgcagcttgggaccacgtaaagggcacacgccatgagacgaagggcagtttacttaccctcagacccacttctgaggccagcgggtgccttagaagagttcctgggaacaggtgtgcaaaagaaacacaccaagtgcctgatggtgtacaatgtcccaaaaagaaataagacctggtcgttgcctggattgtgacctgacagatgtttggcagcctcagagagtttcactctagtgtgattttccttccctaaaggattctcgtatcttggtttctctgtggcatgcacccacctgttttctccgtatagagtcattccttgggctcctcactccagtgtgcattcattctgagcatgttccctaatcacttctcctcgcagctcccttatcaaaaaagacaggacaatcaggctgactaatgaggcagatgcccatgtgaaaaccagctggcgtgcttcataggagctcagctcggggatacgccggcccaggcatggtttttggttcagggtaagcagtcatggaaggtgtctccaggaaagggaggtgaatccctgctgaatcccaagcagccttgatggccagaacgagagtgaaccccaatactggggtctagaatccaggagggctggtgtgcaaagtggcattagtacatgatgccaaaataatcccatgagagaagaaccaggtccccagaagaccacattgttccctctctaaaatgtgggttgcttaagggaaatagcagagccaagaggaaactgagcaggggctttgctcccaggtcataccaaaccctctggcctgatgccagtttcttgaagttctctagctcttatgcctttgtatgggctcttccttttatatctttgcctgaagagatcctagacacccttcagctgaggctttactttttgggaaaggctttcctgcctcctggggcagtggttcatctgggtacaagagacaaagattttctcaagccaagtatacataggctggaactaggacaggaaggtgttagactctcagtggctcacggttctgggggctgaacaagaggcaaccccagggcaatctctttctctgctctgggtttcttttataagctctgtgccagatttccctgtctcacctctcacccaaatttcatagacagctgatgggtttgactgatgacatttatccctcatgagtgtagcacttcatcccagaccatctcgggggtctctgtccattgtctaggactggatgtcccacccctggtacaccacatgattcccttggtggggttgtggaaggacagtttcagcaagagggccttaggtggaccccattgtggccggcttggccaggacacatgctagtcagaatgaaacgtatcctatcctgcctggattgagcggtcatcacacttgtcccacacagcacaattacctgctcataggtctgtgttccacagcagactgtgagctcttgagggccaaagctggtctctcagtcctgaactcccagtccctgtcaagtgcctgagatgcacgtggtgggcacaatgtcagtgttcccagaatgaatggatggaggcatttagacccccatcccatgtcattcaggggaaccacatcggcacagggaggtgcattccagcaaatgtttttataaactagaataatgggggttgctaatgactgcttgagtaatccccttgccccgagtacaccagctgtcttgctggccaattctttgtggaaggaggggatgtaggtgttctggatgctattggtgggaatgagtgggagtcctggggtatagagaccttggagactggttggctagatgcagattgtagaacaggactgtgtaccagtcagcatggggatctgagccctcagcaggcaggagatcccagagagaattcttctctcagagaaagaagaggggatagcatctgacagcagcacctagaacagtgcctgaacaccgtaggagctcaatctttgctcattgaattaattaatagacggagatagccatgttagcagattccactgagactgcatcttggcgtggagtaagctggtgatttaaattgtttagaacataatgtggaaaagattacatcaattcaataaatctgtactgagtgcttgctgcgttctcggtactgttgtttggattcagatagacctacttcttataagctgaatcaatgtgggtaagttatttaacctctctcagcctcagcttcttcatctgtaaagtgggtatccaactgccattagaggttcccatcccaagctcttttgggggatgaattggaacgattagagacaactcaaaattagaaagccgcgctgacttccagacaccccttctcacgtgacattctcttttccaggttcctcccaactctacttctttccacccaggataactggcatttcataacagaggaggtcaaaggcagacttactggtgttgatgtcatccttgtcatcttcctgacatccaggcctctaataacatctctgctcttcccatgtcaatgtcagcaccagacgtgtgaggaagagcaatcactccccaaatctcatacttctacagggctggactccaatcagaaaacattctaggagaacaagatgataaaaatagccaagatattctaaagcagccaggagaggcaagagaagcaatgcagggaaggcatgaagcaaacacgaggcccatatcaggccagtctcctggaagagggaggcccaggcagaaggtttgggctcctggagtccactcctcctttctcgattagagcttctcaagatttgtattgggcctctgtagaatctgacttctgtagtggctcaatacaaatctgtggatactcattagcaaacatccacctcgcagcagtggggtaaggagtcaatgatgtgatgcagtcatgtagctgtggatgaaaatggaagtaatttggagaagccagagctacatcctcaactctggatggtgacagtgttgggggtaaggactgttgcagcatcatgatggagtgtatgtttgggagagccttttttttttttttttttttttgagacagagtcttacactctgtcacccaaggtcctacgttgcctcagcctcctcatttgtaacatggggatgatgacattcttctcccttggctgttgtaaagattaaatgagagtatgatgcctgtgatgatgacaatgacaatagcatgatgagctttgctaacaattattgagcacttactatgtgccaagtgccttatacgtgtgtttgccctttaatttgttacagtaccactatgaaggagatgctatttcaaatctccatttaatagatgagcacattaagccttagaaatgtttattaacttggctaaggtcacagggctgggaaaaaagtcaaagcaagactcaaaccaagcctattcaatgccacggactgtgagcatagccatttctgagcacagtactgaccctgggatatgcctgactgagaccttacccctccagctcaccccaagggctcaggcatggtggtatggtatcatttgtctcacacactccctggaaccctgtaatttccctcctggcaggctcttttgtgatcctgagacaagtgcttatttacctcaaccacttctgtgctccaaagaaaagttcagctcaccaggaagaatcatgccagcatttcccagtgaaccactcagacaagaaaaaatgcacttttctccccctgcgctgctttctagtaacattcggcagtaataacaataacattagtggtgatgacaagtcgagggacacagcacacacttaatgttaggcactttgctagtgctttacatataaaatctctgtgccctatagctactccacactgtaggtactactgttatgcccattgtattgataaggggtagacaaactctggcccacagaccaaatccatccttccacctgcttttgtaaataaacttttattggactacagccatgccaatttgtgtatgtgttgtctagggctggttttgtgctacagcagcagagttcagtagttgtcacagagaccatctggcctccaaagcctaaattatttactgtctggccctttacaggaaatgtttgccagtcccttatctaaatcctgaccctgaggattagaaagacctaccagctttcccaagatggcagagggaagcggtgagggatttaaagccagacagccgcacagcagactcattgtatagccccttagctgtatttcttcctgctctaggcttggcagagaagacatctctaagcatgatagtccccaacccttgacattggataatattcaacacagacataatgcttgacaggatgcaccatagaagggacgtgattcatttgcagactggcagtctagactcttgccacactgggtctcatctaggtgtctgttccctccctccctccctccctccttccctcccttccttccttccttccttccttccttccttccttccttccttccttccttccttctttccttccttccttccatttgtccgtccatccattcttctctgctcaagctgaactgctgtcttcatttttctccacgttcccacctcgacagctttgctcacaccgtttcccccatctggaatgccttccttttcacatttatcacagtcctacccatttttccaggcccggtatatctccttcaataagtcttccccaactgaggcaactcaccggaaattctttggcatttgtgctgtatcagcacaagcttttggtccctcccttagatcctttgtgcacaaaagtgagggaacgatggcatcacggatgatgtgtgaaccagagggaagagcaaatgtggtccctgccttttcatcacctaaagattccaactccatggagctctatcctttatgcccaggaaagagcctgccaaaggtctctgccattcatctaagactttagacaggtcacttaaactccctgagcctctacttcttcatccgtaataataactgacaccgagggttgtaccaagcaagggctggctgctcttcatgcattgtcacatttaaaggtgatccgtgacctccagacttcatgaagtattatgaagaccgggtgtaaagaggtcaagttagaggtcaggactccccaagtcctcttttggtcttggtgacctttgccaagctcccctttccctctccaggtgccagtttattttttaatggtaaaatgagggaagggtggattgcatgatttggatggactcttcagggtataatactaaaatagtacaaaccattttgcaacaaaatcatgttaaaaagacgttgggtgacttcaaaacaatgcgttgaataagccatgtactccagtgggtgaaatgcttcttaacatggaaagtagggagacaaagcattctgtggcttcaatgcaacaagatttggtggaactgtaaatggatacttgctttctgatcacttacctaatctgatctctgatcattaccattgtcaccagtcttgactctctgagacctgacatttgctccatgttttatgagtatttttcatcatttctttggttgcagagaacaaaactccaattcaaactggctgatatatacacagatgagctcatatgaatgggaaagtgtcaggtgtggctgaatgcaggggctcacaaatggcatcaggtctctgtctctctgtatcttcccctctctgcttgcctctgtattggtgtaattctcagacagactcgttcattgtggtcagcagcagcctgaggctcacgaccttccatcttcagcttgagcaaaaagactcattttgctaagaggtccaataaagcctcagatttagggtctcactgtctcagtccagacctttattaattctgggacctgggcaatgaaatattcggattaggagctaggcctgtgtcaggtttccacatctggaactagggagggatgctcagcccaccagagccccaaggactgtggttaggactggtgtgatcaccaaaatatggagaaaggaatgaaggaatgccaagcgggcagaaacaatagctgaccaggaaacatggcattccctgaagattctgtgttctgtcacatatctccatgcctgtgcacatgtggtgctgtcttcttggaatgtcctttccctttttctgtttctgcgaaatttctatttaacctttgaaaacaagctcaaataacatgagttgtgaaaagtcttccctgactctcctccctctctccctctcctgcactcgcgctctctcgcacgtgctctctctctctctctctagcagttatcacccatggctccccttcactctctgggcactccaaaaaggcagacatagtattctgttccattttgcattcccagatcccagcactcaacctgggagataaagagtgctccctaaagctttggttgaaataatgaattgactaatttcagccctcagccttctaacgttattgttgatttttgtctcctacatcttcagtttgaaaacgaaatcatcctgaagctggaccacgaggtagaagggggccgaggcgacgagcagtacatgcagctgctggagtcaatgtaagttcagtgccctgtgtgtaggaacagcctgtgaaggtcaggtgaggcgggagggctcagaactccagggggctccgagtggctctgtcctcccctggagatggatctagaggctcatgggtattggcaaaactccatttttggaagaaacctcacatttctctctggagtggccatttctttggaactgatagaatgggccaggtgaaaagaatctttgctgtgttgggaagagggaaataatttaccaaaatgtctactttcattacgtcttaactgtggaatgtgattgctatttttccttctatttaaatttttgacagatgttggtcatgccctacgtttactgagcacacttaataacttagcatgctattgtgcaatgtgctgtgtaatccctcctttaatcacacttactccctttgatgcccatttcacagaggtgggccctgaggctgagggaagtaagcacattgttcaaggaaactaggacgagctagtggggtggacaagctgcatcctgaacctggctctgcctgactccagtgtccaggccaggggcagacagtggacagagaacagtgcccaagaccactggacttggagtcaggacatcattttaacagctttatcgagatgtaatttacatgccatacaatttacccaaagtgtacaatcattgactcttagtatgttcacagagctatgtaaccatcaccacaatcaattttacaacattttcattactcctaaaaagcaaccctgcaccccttagccactgctctgccaacacacacacacacacacacacgcgcgtgcgcacacacacccaaacactcccccatctcccctagccctaggccaccattactctgcattttgtcttgcctataatgttttcaaggttcatccatgttgtagcatgtttcagtacttaatgccttttaattgccaaataatatttggtaattaaaatatttggtaccatatggatgtaccccattttgtttattcacctctcagttaatgtatatttaggctgtttctacttttttactattcgtattgattcttctgtgagcatgcaggtacaagtttttgtgtggacataacgtttacagttctctggggtatatacctagaaattgaattgctggatcatacggcacctatatttgaccttttgaggaataaccagactattttccaaagtggcagctccatatatatttctaccagcaatgtataagggttccaatttctctacattcttgttaacacttgttaatatctgtcttattgattacagccaccccagcgggtgtaaaatgatatctcattgtggttttgaattgcatttccgcgatgtgtagaattcattgattttcagtacactcacagggctgtgcatctttccatgtgcttatgggtcgcttgtatatctttggagaaagacattgggttttgatcctggctctaccacttagcagctgcaagacttcacacaaatcacatgagtctggcctcagtatccccatttctgaaatgggaataataagctcctgtggttattgtgagaactgaataattataaagcatctggcacacagcaggtaaatgcttcataaatattcttccatctccaggacttgctcccagtttctgtctttgacagcttggtaattgcccccttctcccgcgaggccttctcctaaggcttaggaacgtgacccagacatccccacttctcgctaagtgcatattctctgatttctataattctctgagatcactctggtttggattctttcttcaatcctttttgaatattttaaattcaataagaaaggcaaactgaaggccttgctctgaccccctacaatgagcctctcgaccctgcccaagcaggcagagcccagaggacaggatggcgccccaggcagtgccatctcagctggcccctgtccccttcctgtcaccgtgcatggccctcactaaacacttggaatgcaaatgccatttggccagaaggagaaacccactgtctgcccctcaggtggatatggagactgatgtatctggggggaataaacaatattctggctgagtcagtgtttatcttaaagttctaaacaagaaaatcaaaatattgaccagaagtgaagcaatgtacagtgctggcaatttccatttttataagcggatggggctctgcggcggtcttcagatgatcagcagggttttcaaatccttcctgagtgattatttataaaaggagtccttagaggtcaaagaaattaaagacagctcattatttttctcctgaaacagaggtgtgaatgatttttgcacaaaacaaatcaagcccgacacagggagccaggtccccatcagaacatccatggggcccctgtgcctgctccatcctttcacctctctgagtctcagttttcttatctgaaaattggggataaaatattatcgagcccttagagtttttgttgggagtctagcaatattaattattagtagtacagattgattaggccttatctgaaatgcttgggacgagaagtagtttggatttgggatttgtttttcagattttgaaataattatacttaatagttaagtgtccctaatctgaaaatccaaaatccagaatgctccagtgagcatttcctttgagtgtcatgttagtgctcagaaagtttgaatttcacattttcacatagaggacagtcaatttgtattacttacaggtggatagcattgcgggtttttgaagccatgagcctgcctatcttttctcccctaggctagtcatctcagttcctccagcctttcctcccagcccctctttcagggcctgactgatacacagggcccccactgggcagatacagtcctgtgggcacatggcttggatggggccttggtgaatagagcagagctactctccctgtggcaactgcagccttgcataggaacacaaggtttaaggcatggagtggggctgaatttcagtcctcatgtgctctgtgcagtgcacaagctatataaccttacacagcactccagttctccctaccctcagagctctctttggagcccacgctcattgatccacgtatatctgaaagtgtaagtctcacattgaatggattcataagacacaccgctgcctttctgtatttcattcctgcgaatagttctagaagtggtgagggaatcggaaggttgaagcagatagatgtatgttcttgggcctttatcctacccagaccctttcaatccctggaaaaggacctgtcacaggtcatttcatttcatttcaaggaatgaaagaaagtccagtttcattagcactgacagagagggggagtctgggatcctccctctaaaagcctccaatgccaagtgaaaatcaactgcagggaggagtgagccccctctagtcctcccacaacaggagcagaagcagtgtggcaagtgtccaccacccttcattccactgcgtgaggaattacctatattttcttatgattcccaaagcttttgtcatactctgttgtgggattacaaggtaaacaattaaacaggcttagcatgcggtctggaacacaggaagtactcaataagtggtagtatcattatatattatggttaatttttatctatgtttcccatgctagactgtgatctcctggaactctgaatccctagtttctagaatgccacatgttgagtggaaggatggatagtggatggatgggtcatttctagccaattttcccatccatttcaccaatcctagatggtttgagcacctttcttgctccatgcataaagaataggaaaagaaagaaagccaagacctttttcttctaaaccctggtttctccaagtgtggtccattgacctgcagcactggtatcacctgggagattgttaataaggcagctgctcaggaaccagcccagatgtgatgaatcagaatctattaacacaatgccccagtgatccccatgcacatggaagtttgcaaagtcttggacaaaaccagttgttctttttttttttttttccgagatggagtctcgctctgtcgcccaggctggagtgcagtggcgcgatctcggctcactgcaagctccacctcccgggttcacaccattctcctgcctcagcctcccaagtagctgggactacaggcgcccactaccatgcccggctaattttttgtatttttagtagagatggggtttcaccgtgggagccaggattgtctctatctcctgacctcgtgatctgcccacctcggcctcccaaagtgctgggattacaggtgtgagccaccgcgcctggccccagttgttcttaatgttagttccatgttggaatctcctagagaatgtaaacaataaaatactgctgcctgggtcccaccctcaaagattctaaggttattgacctaagttgagcattgggctttgtaaaagctcccctggtgattctatcatgtgaccagggctgagaacctcaggtctggccaagctcagaccccgagatgtctcctgccctggaaagctttaaaaaatcacacaccaaacactgggaagaagctttgttgcattgtcattagggtggcacacagggctagaagtgactgtcccaggaggaggcatgcacagctgtggctgagccagacaggtctaaatcacagggccatttgcatctcccattgagagccagggaacaggtgcttctcccagagtgaagatggatttgtcttatcacagccacagtttgagacgtcgccttcttgcagcttggcttggcttcttggaggaaatgaccctcagaagtccttgcttttcttacctttaccctcctaagggcccctggagagtttcagttccatggggagagtagacagatacaaatcacgtggcctgcataatgtctacttgagatacctgggaacacgctctggtgtttctctgtgggaaaaatatctcccctaaatttaacaatgattggcttgattcaacttactatcacactgatactgggaaggtcctttaatctttctcagccttcattttctcacctgcaaaatgggggaaataattctcacttatcagaattactgtgaggatttcttaagaaaagtgactagtacagtgtctggcacagaataagtaattaagaagaaatagtcatcaaacaaaattttaacccatctgtttctccccacctagtctgtgggctgccagacagtaggtgtggttcttttctatattgatgtctttctgtctaccacacaatgcctagcaactaatagatgcttaaagatgttacatttttatttttgtttttaaaatttagaatataaatactaaaacaaatattataattttaaaaaataatttacacatacttaaatagaaaaatggaggcttttctttcctattttcccacctaaagccttgttggaaacagccatcactacgagtttggtgtctatccttgctgactgtacatggcactttataagcacatagagacacatgatggccatgtacacttgcacacacatgcagtgttcggcagtagagacacggatgctggggccagactttttgatattcctgaccatgtgaccttggacagcttagtggacctctccatgccttcgtttccctatctacaaaagtcccatctcataaaattgtgacaggaggttaaatgagttaccatttgcatgaggtttagaataacaccctggccatgctaagctctatgttagttggttaagtgaaaaacaaatattgttctgagacttacttttctcacctagctctatattttatagagcttttcatgcccagacatattgaatctctccaatatttttaatgtcttcatagaattccattcggtgaatatactgtaatttatttaggcctttcccaattgatgagcatttaagatggttccatctatttcactattagacacatttgtgagtattatatctttgcatacttctgagaatatttctgtagaacagattctgcaaagtagagttgtggggtcagaggatatgtgcatttacaatttttacagatactttgaaaattgcttccccaaaaaagttttcttgatttattctcagcaggggtgggtaaaagtgaccatctcccccaccatcattatctatattggaaactattttatttttattttttcccattctgatgttagaaaaaaaaattgctgcactatatggataaatacatgaataaatgaacaaaaggagcagtcagggaacttgggttgactgactgattttgcatgtgctccatcccaccgcccactggccccagcacagtctttctccccagccatgagctcactgccctctggtctctgccacagcctgatggaatgtgctgcagagcacccaaccattgccaagtcggtggagaacttcgtgaacctggtcaaaggcctcctggagaagctgctggattaccggggtgtgatgacagatgagagcaaagacaaccgcatgagctgcactgtgaacctgctggtgcgtggggctggcgggtccaagtcagaccagaaccctgtgggggggcttgggcttggctttgggtctcacgattgttcttcatagggaagcagtgcttaagggctttggaaagcagacaaatgtggaatggaacgtctgctgtgctttctgctagctttgtgtcttgaggccgtcacttcacctttctatgcctgcctccttatttataacatgagattaatgcatattccctttagcactcaacacatcacatggaaggaagatgacagtatagactggctaagagtatgagctttggagtcacacagcctctgggtttccatcctatatctgataattaatgggatggacaagctaaggaaatgttctgaagtcttagtttgcttatctattacatggagaaaataatggttccaatttcattaggttgtgttgccctggcccatggttaaatgctcactatgtattagtttccttcttcttatagaatggagtcacactaataactagaattgctgttactatgaaccaggttaaccagagaagctaaccccagacccaagttcttaacccctatattccatgagctcccatgggctggctgccaagcagcctctctcacacgctctgtgattcgaccaggagacaggtaggtaagcagccataatgcttcatattcaccgtgtcatcccaccttaaagtggtttaaaagaatgaagttgaccaaaaggccacgtggcatccatcacatcaacctccctaccattcccaaggctcctgaaacacaaaacctgtccccagagctctgttgtgtggcctccctttaccctaaatagactttttttttcaacagcctagatattgccattgattttctagaatgccaaggagagtttaaaaatcccgatgacagcagaaaggaattcattgctaataactccaccaggcccagtttacataaagatcatgaagaggtgttttccacgagctgagcagcttctctctaaggagagacagagttggttgaggaaagtgacctttaacagccagctaagatcagggagaatgcttgggacagacagttctccaagcactgagacaccactagtttttagtgcattgcttaaatatggtgtcaaggaggagggtggggatggaggtggtatcaggacaaatgatgtccagtatgatttgccacccattgactgtgtgctctggaacatgtcaccacccttctctgaccctcaggtgcacgtgggtgtgctgcattaaaccaggatatacacctggtgtggctcatggattggaccaggaccacctggctcagaatctgtagggacttgtttaaaaaatgccacaggattaggatctctggtggtgaagtccagggcagctactaatctaaatggcccctgagctggaatagggacctagattcctacgtattgccaagtttaaatgttttggcgacagaatcccatataattcctgatagttctgcactatcaggaattctgatctcttactattaccgaggtgctaccactcactttccaactcaggttctttccagtgcaaggcctgagctttgaaacatcaagctgggctgcctttcaatgtgggcctggttaaagtagactaccccagtcttggcagcccacctctcaatgcagcaaaacactgaactgcccctcctgatatgtgatggctgagacacatcaagtcctctctgttcctttatagtctaagggtcagggaagtgactttcaaagcagaatcttccaattaggctgtttgatgcatctttggggcatccaggaaaataagtttcttattcctatctcagggtacccagatactagacagcaatcttcctctcatcttcatcaccacacccttgaccgctgtgatattgcagagaacaacactcatcattgtttttcctcccctacctagaatttctacaaagataacaacagggaggagatgtacataaggtaagattcatattttctaaaatccagacctgctgtgtcactttcctgctcagtatccatcgatggctccctgctgccttcaggataaaatttaaacttctcttcttgacattcaggccctctgtgttctgattcctgtcaatttctccagattcaattcctttcattctcccacagtcagccccataaaaccacgtgaaatcgtctggccttccatgctgtcctgttgttcccacagatcatattttccttaagagtgaatactttgtgatttgaactgttggggtgcatttgcattgttgcgggcctgaccttggataaattactgtgaagcctgagtccagacatgtagtaagaccattgactagcccagttttgaagggaaaaaaaagatactaagatgcatgatatctgcatccttgtaggcatttaaatgatattatttgaatatatcatgaaggttttttggggacattagcctgaagcaaagaactcctttgccagtttttctcagaatctcatatttttttctgcaatttaaaaattattgttacttttatttataataaaaaatatatacttattacaaaacaaaaataaacttataaaatatgggcaagcaacacaaaaaatgaaataaattcccataatccatacatatttccaggacttttttatatttatatatacattgaattctatgcatgcatattttttgcaaaaatgggtttatattacttgtaatttattctttgctttttctaacttgacaagaactccatgttgacagatgtatatcaacatcatttttaatgaaactataaaattttttccagaatatatcatcatttatatagccaatcctatattgttgaacatttagattgtttccaactttttctacaataaaaagcacaaaaacaaatttttttttttttttttttttttaaagacagagtttcgctcttgttgcccaggctggagtgcagtggtgcctattcagctcactgcaacctctgcctcccgggttcaagtgattctcctgcctcagcctcccgagtagctgagactacaggcctgcaccaccacacctggctaattttgtatttttagtagagacggggtttcaccatgttggccaggctggtctcgaactcccaacctcaggtgatccacccaccttggcctctcaaagtgctgggattacaggcgtgagccactgcgtccggccacaacaacaaaattcttggacgtatacctttatgcacatccttatgaggctggagcccttgaggtagagtcaaccagaagattgaggagcaaggtatttacagggcttttgtcacattctgtcagagggcagaaacttcaagtctacgctcactctgctattacggcagatatatctaggtacctagtttagcattactccagaaataggagctatcatttggagaaaaataattttataggttgtcctgagtttgggatatttataacatcactagtcataccttattgtagcagcacaaagctttggggtctgaaggacctcggtccttgcctcactttttctgtaaccttggataaattactcaatctttctgggttgaggttttcctacctgtagaatgtttccgtcctaccttctgttttgaggattaaatgaagtactataggtaatatggctgccacatggtttcctccctccaaccttgtttctccccttctcattttagaaacacagacggcaaatcccagacctccacaagctttggagatttgaggcccgtagtaatctaagaaaaccatatttatctaaaccagactgcaaacagggtatagtctgaaaatctgttctgtttggcaggcagaatatttaaaaacatttttaattggctgccaacatttaaaaatctggagattttacataaaaatcaaaatttcccttttctcctggaaaactcagaaggtgtgacaacactgggccctcgtcctattctgacgactgttagccgaaccgggtggtggcagccattctggacaggcctggagcactgtcatcacgacatcatctctattccctactgtgctactccccgtccacctcgctcaagcacctgccatctggaggtgcttgagtttggtatccctggttgagggacgtcttctttttactagggtgccttcttttgggttctgtagcagatcatcagacccttgagttaacaaggaagaggagagggtgccaaaggaggagttgaaagtagcagggaagctctcccctgggctgctctccccaagttttttgaactcagccatctaggggtctaaggcatcgaggatgggcaggaggagataaggcagaattaagccatgtgtgcacacacaggtgtttctaaattccaaactctctacatggaggtcatgtgcaatttcacggttaactccgattggcagaacgttaggcgggaggaaagtggaaaggctgtgtctgtgaaagcagaaatcactaagcttgaaatctgcttctggctctggctcttttaacctggatctcagttttctcatcttaacagagttattggaaggatgaattgataaaaatacatgataataaaacacccattttttgaatgaatgaatgaacaaatgtttctgcctgggaagctctcccaactcatccccttccccttcagatcaactgttatgccatgggaacctttttagaagcccctcttctccccacctggataaagcgtgctctcctagtaccatagaccactccttcacaacacatatcatcgctgtgttcttgctgttatgtatctgttgatttgattcatgcctgtctcttctcctagactctaatcccaaaccctgagaacagtgcctgcgtttgtcactgtttatctctaaggcctgttatagcctggatgcccggtacagctttgctgaatgaataagtgaatgaacaaaagactgccagggcatcccagcacagcagctatcaaatcaccactaggtgacctttcctcgcctcaaaatctttggcggtccctgccctgatttcaggcagcctacatttgacccactgacccattttatgtggcaggaacactgaacattcacttctcctttggtgagcttcgtgcagaaagcctttttcccaaaaggaaaataaaccagagcattgagacacgcattgagtggagatacccgagaaaccctgtgttccctggtgtgagacagtgggtcagggtagaatgctggcaccatggcaggcattccctgcctctcctctcacatgaagaaattagcatatcccctcaccacattacttagagttgggtttaaataaatcctgctaatgatatgcaggtcaccgatgcagtggttcattgcctctggattctgtttccaacggtggcaggagagaatgttttgtagaggaatctagttcacagtgataataggtaataactgtcactgctcagtgccggctacaggctaatcactttcagtgcatacttgcatttcttagcagcaatgcaagctgtcatgtattgagccttttgtaagacacacatggtctccttggccctttatatgcccagtcactttatagataggttctgtgaatgttgccattttacagatgagcaaactaaggcacagagaagttaattcactgccccttaatacctattatggatcagttatctaagaattttccaaagcgcccttcctttgtccttgttctcatcctcagtaccctcagttatattgccatctcatggttcataactgggatctcacttttcaaagggacaggaagttaaaatgtgactgcagtcaaatagctaactcttcctactgacagctcaaggtctacatatgaatatctattctccagccccgatccacttccttttattaccaaaaaatgcacttacttacacccagagaactctgcagagaggggtaggaactgccccttatagctgctgtggcttgttcatactccttcaatgacacagtgattaagagcaggcatcatgtcctgactcttctgtttattagcacagaactcctgataaattgtctctctctccttcctttatttctcttgcttgtcatattgcattggccagaccattcattatcaagttgcatgttagctggaatggcacctaacttatccaggcaatagttctctcatctgaaaagaggaattcctgagactcatctcatagggttgtcataaatattaagtaatctaagaaatttaaaatagttaacttagtacctgtcatgcactaagtaaccaacacacactaggtgctgtcattacccacacaaagttctggttatccagggaggaggactttcttgcgacccagagaggtgcccagttgttctctgggctcctgcttgtccctgccaggtgtctccttttcactgcacctggtagcttactgcatattttccctcaaacaggtacctgtacaaactccgcgatcttcacctggactgtgacaattacacagaggctgcctacacgctccttctccacacctggcttctcaaggtacagtcactttgggtgaagggcatttatgctgggatcctgacagggcctcacagcaagttgaagagtgaaaaaagaaaaaaaagaaaaagagtccaaatattttgttttgccctgtgtctccaaactcttgagctggcaggatactttttgcactgcttccctggtcacatgtggttttgagtgatctttacatttagcaaaaacaacccctcttcgagatacattttgcagctttatataatatctaaactgctattaacggtaaatcattggcatgcccactgagctgcattccttctgttgagaacttagctgtagctgggaaaaaaatcagaatgatttcctttggctttgggagagctgggagcatgtttcttaggggttcaatgtaaatatctacaaacaacacacagagagccaataaagagtaagataagtgcaactcaacaaaaaccaggagccttcacaagtggaaattgcagcccagcatctctctgactgacactggcacccaggacaggcagggggaagctagcagaggggagggtgtttgcagggcttcatctgactcctgatcactgtggttttaatatttcatgttccctcatttgtctgttttgggacttgggacattagtgctgcctggagggcaacctccaaatatcctgagtactcatgcctcaaaagggcagcctctccagtggtaccccaagtttccagaaataagctgagttcaagaaaggaggagagatggaaaggacagggtgtgtgttggcggggtggttcctgcctttaatcctaggaagacacctgctcttggcagcctctcggccctgtgtgacttcctgtgtcttctcttcacagtggtcggatgagcagtgtgcatcacaggtcatgcagacaggccagcagcacccccagacacaccggcagctgaaggagacgctctacgagaccatcataggctactttgacaaaggaaaggtaatctgtccctgcccaccccccgtggggaccctggccactggaaggatggttctctcccataccttacatccaatccatcctcagctctgtcagatatccctgcaaatcctaactctgatcacttctctccacttcctctccatctccattccttccacctccatgtaaggcaccgacattgctcacctggacactgcgatggatcctaaacaattttcctgcttcctccactacccccaacagatcatcctccatatagcagataggatgatcataaagcatagattggattatgccattcccccactcgcagtttctcaatggctctcccaatctacttaaaacaaattacacaatccttcccatggcccatgaggccccacatgagctgtgccctggctgcctctctcatttcatccctgctggggtccctcttgctcacgtgctctatgccaagctcttttcaaactcagggactgtgtacttgcttttcccagctggaagcattcctccaccatagctgcccactggaacgctgggctccactcagatgtcacatgctagggaggccttccctgaccaccactaggcaaaccagcagcaccactgccccaggttacccttatggcttcttcaaagcacttgttcctatgagacatcatcttgttcattttctttttacttgtttattttctggctccccaatttagaatgctatgagagcagagacttgtcttgcccactgctaaatgcccagtgactaggacagaacctaggaagttcccagtgaatatgtaggcctatgtcctaggttctgttctaatcactgggcattcataaatgaatgaactgaatggataaatgacatgcagtgtcatccttgatctttaaacagcaaggatgcttggctgggtttggtcaggagattggccagaccagctgctgctcagctccagcctctggtggaccttcaggaagtaccagccccaaaactgccatgcaccctatagagaacattgctcggtggccacatgctcaagttttggggccagatggcccatctgcaatccttgctcctctaccacctactcttcccttgacctaagagactccaattccccacccataacagtgagatgctaatagtaccttctttctagttgtaccgtgaaaatagagtgagaaaatgcacgtagagcaccctgcataggacctagtgcatagtaatagctggtgaaatgtcagtaaccgtcatcattatcctactccaccgcttcctctctcaagcctttcctgagtcctctggcttacctgcagccctccctctcctctgcaatgcaagacctcttacagttcatcaggacataatttagcactcaatttgggcctgtcctgtcactgtagtttattgcatctgtcttagtcggacccttctaccttctctggaaagataaaatgaggtaatgtctgtggaagggcttataaattcccaaggctcaagcagttggagagcactgttttcataatttacaattataagcctcttgagggcagagatgctgccatcccttgaacctcctgccctgctgggtgtcaagtcagagcttactatttgtttatcagctgattaagtatgttgcagtgtgagagcctaaaagtacacgttgagctttgtcctcagcaagatattcaattcagcccactctgtgctgagcagagaggaaaaaggcatgatccccaacctcaaaaaacttactgtctagtgagcaaaacagacatgccaataataatattttttgcattgccctttggcattgtgcaataatggggaaaaaggcaaaggaacagggtggtgccaaagtactttgagagcagagaggagggagcagatgggtacagcttaccctgaaagccactgctatggaagctcctagaaggaagcccaaactcctcagtgccccctcagctttcgttccctatacctcctcagggaggctcattgctccaggcacacatgctggctttctactccataagttcatcttgccatcacccgatagactcctctaaattcctcaaaaccaaacgatttcatctattgatgtatatcctttgtccacttatgttccatgagagtagagtctgtgtctcgtccatctttatatctgtttcattactgcacaccacaccatgcccagaacccaccgtgtgcttagtaatgaatgtgtaagactcagagaaattagtgactgttggaggtcccagtggccacacaggcagacctgagaggaaatcccaggcacctgacttcctgccccgccctttccctggtctcttagtgatctcttaacccatggggagagcgtttcttctccctgttcacattatggtgagaagtagacaaagacctatacttgagcccaacagtcccctggcccagcccagggggattaccccaaacttcaggttcaaggtgaagagaaaaccccagcctggcccatatacttgattcctcttcccagcacataaagcatttttatgctgcttgctgagctgtccgtgggtttacagccgtggcttctccactcggcacttggttttatttatttttatgcttggatgcagagagagcacttttgctacacagctcacactgcattttggcaacctcccctctctcctcctcctacctcccccagcttctccatttaggtgcattttccattttaaactgaaggtgaaatgtaacggctatccctagagattgccagcctccggtccaccctgcatctcccctgactctgcagaccgtcctgacctccttcggtctaagagagtgaggtgatctattgactctcgtctaagacagaggagagaagaattatccactatgtctagggtttctttgtttagaattttttctcttaagatggagaagacctactattaaaaaaaaagtcttaatttttttttaatattctagcaccaccccttccacctctatgctacctgactctacttccacacatcaaataatcccattaaaaagtgacaggattggcagagtagaagaatcccaggactgcatatcaggagaactggggcctggtcccaactttgtccctggaaactctgaccttgagccaccttgctcacttctctgtgaaccatttatctttggaaaagggggccaacacctccctgaggaggctgagggaatcaaaggtttccttcactaaacacgagcacgtgggaggcagggactgaagagcaaggccctggagacacacacgggggcttgcatcctgaccctgcttttagtgaggcgttttgacccgggacaggttgctgggcctctctgaacctctgtttctgacccggacaatgaagatgctgtcagttacctctcagagtggttgtgaagaatcagagcacgtaaataaagggtttagcctcatctgtgcctactcaattgtttatcaagaaactccggtgagaggccagaggaaggtcgtcctctctaggaagcccccggcccctctgtatgggggtggatctgggtcagagcaaggtttcccctcagtcccaggaagcacagctacgcctgagtcccttcctcagcaagcgctctgcaaacccggtggtgccacctcacctttgtccctgtgaccttcctgtagatgtgggaagaggccataagtctgtgcaaggagctggcggaacagtacgagatggagatctttgactatgagctgctcagccagaacctggtaaggcatcccctgggaaggctgaatgccctgcaggctgggtgctcagggcctcagctcaccccagatcctggggagatgggcatgagggccaggcggggttagggaaatagaaaatgaacggaagtaggacctgagagaggctgtactgagcatctcccttcccgtggggagtattttcaaagagagatgtcgtggggaaatgcttcggtgacagctcctcaaagggagcattgagtacctgcgaggggctgcaactgccaccgctgctgcagccccaataaacgctgtgttacatttgcagtaaaagttccacaaatcactaaaccaattaaataaaaacacaaatttgtgctttctgattaacagataaatcacattaaaatgctccccatctggttactcccattagcatctccatgctcaggatttggtgggggaagtggagagtgggggaagccagcccagccaatcctgcttgtactgcagaagcctgggtttggcggggagttggactctgcagggaaatgcagaactctttggctgcttccctcccgcccatcctccccacatgttttctggctgcctgagcagcaggaccccagggacccctcttagcccacttagagaggccaggccagcgacttacagagtcagaatgttaggagaggattgatagcttttggtggggggaaggtatagtgatcttgttaaaaacagctgagctgttaactgttttcactgtttgtaagataatacacaaatacacacacatgtgcttgcaccaagagacacctaatacctgccccgcgtgtacctccacatagatgtttgccaatgcctatgcccaagacacacacacatacacacacacacacacacacaggatacattcaagcacacactaatgtatgtgcacttgcctgcacagagtccacatcacacaggcccccgtctagatccacatatatcttccagattgtatcaaatggaagatgccatcgatcatacaccattctttttattgtgccatgtcatgattccttcagggccaactgcagttataagatgccattaggtgtaaagtaagattcagactgtttccagagatgttaaaatacgaaaaacacacacctcttagaatagatgaaatgtcttaggtatacatgcacaggaaaacatctgtatcagggggcatttattcattccatagcctcacaaatccatgcccaagtgtgcatggaggtgggagcagagatgcaatgatgggaaccctgaatgcaactaactgggttcagctccatgcttactggctgctttacgagataccatttctttatctgcaaaatggagatactcatgggattattacaagggtgattcaagtaaccacactagtgcaggtagagtgattaacacagtccctggtatactgtaaatatagctattactattgtgattatagacatagcacagatatgtaaatatgtgcacatggctcattggctctggtataatgaaaatgtcttcaccaaggcctctttgagttgaatgtgcctttgatacacatctgtgttgcaacaaaccttgttttcttcctttagatccagcaggcaaaattctatgaaagcatcatgaaaatcctcaggcccaaaccagactactttgctgttggatactacggccagggattcccctccttcctgcgggtgagtttgggggtgacttggacaccaggcgagagccccagggcctcggcatctcagcggtccttctatgctttgaggatttgcttgtgctcagaagcggtgctcttctctgtctgagtgctgcccccatccccaggagactccccagtcaatagccctcatcataatcaccagcatttctcatctactgtgtttctctaactacacagcaattacagctgcctcgtgaggtagtgagttccccgtcactggaatgaggtgttcaaagagaggctggaggatgtttgctggcagagatttgctttcaggagttactgtagagcagtcgttctcaggctttttggttccagaaccttctttctctcttaaaaattattgaggatcccaaagaacttgtgtgtataaagataatctctatctacatttactacatgagaaattaaaactaagaaaatgttttttgaagtgttcatttatttgaaaataacaataatggtccaggcatggtggctgatgcctgtaatcccagcactttgggaggctgaggtgggcagattacttgagctcaggagttcgagaccagcctgggtaacacggtgaaaccctgcctctacaaaaaatacaaaaattagctgggcgtggtgatgcgcacctataatcccagctatttggggcctgagacaggaggattacctgaacccaggaggttgaggctacagtgagtcatgatggggccactgcactccatccagcctgggtaacaaagagagaccctgtctcaaaaaataaataaaatcttaaaaataaaaatagcactaataaacccattacatgttaacataaactgcaattttaggaaaaatagctctattttccaataaaaaatcagtgaaaatcatgagattgcttcacatttctgcaaatctctttaatgtctgacttaagagaagacatctagattctcatgtctgcttctgcaatctgttgcgatcacacatcacgcagcctcagaaagctccatcgtacactcatgggagaatgagaatgaaaaggataaataacagctttcatgttattgtgaaaacagtgtgatcttgtggttcctgagagggtcttgggaacctcaagtgtccctggagcacagtttctgaaccactactgtagtggcctatttacccatcacgtgacgaattggattaggtcaccagtaggcttccttcagtctgtgagcctatggttcaactctggggtgagggaaatacaaaagaaatggctaatctgatctccaacctcacttgatttagtctagtcaaggagataaatcactcacaattattaatcaacaatcaatgtggaagtgagagtgggcctgcaggagtgattgccatgagccgcagagaggggtgcaggtttcatggaggaagtagaggtggcttcccaaacctggctgtacgtcagaatcccctggagaacttgttaaaagtgcagactcctaggccccactcccacagatccacagattccatttcttgctctgtcgcccaggctggagtgcagtggcttgatctcggctcactgcaacctctgcctcctgggttcaagctattatcctgcctcatcctcccaagtacctgggactacaggcatgtgccaccacgcccagctaatttttgtatttttagtagagacggtgtttcaccatgttggccaggatggtctccatctcttgacctcatgatccgcctgcctcggcctcccaaagtgctgggattacaggcgtgagccaccaggcccagctgggaatctgaatttttaaaagtgtcctaggctccttggatgatcagccaggtttggaagcactgatatgtagagatgtatgacagatgtgtgtttggacagaggaaattaggggccattttaggcagtatgggtggcacagatgtctagagcagagtttctcaacctcagcactattgatattttgggcctgaaaattcttcattgtggggctgtgctatgcatcgtaggatgctagcagcatccctaaccactaccccgtaggttctagtagcatcccccattcccagttgtgacaaccaaaaaacgtttccagatactgccgatgtcccttgggggacaacatcacctttagttgagaaccactgatctataaaagactaacatggtcaggaaggataaagagtgtgttttcacaggcttagagccagaagccaggtgatgaggatatgaatgctgaaccattccagcccacaggtccagcccacatggcccattacaggcaacggggaaatgttgtggccatgtatataggagagtgggtgtgacacagtgaaacctgagtgagtaattattctggaagctgtacataggatggtaagaagaagaaagttctcagcatccatgatcttcccttcctctagacccagaccctttaaagtagtgatggcctctgctaggtcagtgagttgagcccttcctttccctgtggggaaaccaagaggagagtgatgcactggacatccccatggaccgtggtcattttacaagctccccagctttgcttggcccctttcttcacacctgggtccccaaatctctaatgagcatcctttctctgcagaacaaagtgttcatctaccgcgggaaggaatatgagcgaagagaagatttccagatgcagctgatgacccagttccccaatgcagagaagatgaacaccacctctgccccgggagatgatgtgaagaatgccccaggccagtgtatccttggagaatgccctagccaaggggccagacctgagcagccctgccagggctgcagcccacaaagacccaccttagagctcagggctgctgccagaatcattgcagtggcgccatgttgcaggaacatgcaacatgttctttggatccatgttctttggatccttttctggactcttcatgatcctggcatcttgagctctgtttgctttggaaaatttgtctccctttggtgcttttcaaaaagtgcatgaatgtgagctagaatgtcaactgtataaggaaagacgcttgctctggcgtgctccaacttgctccctgcagtaagttcccatctcccacggtgcctggtacagagtgactcccagtaaatatttgagatgagatccaaagaacctatctcaatacattgtaaatgttgcatgcattgattaattcactcactcactaattcattcttatattgaatactctcaagccctgactctatgctaagcaaggtgcaagggactggagattttcattcacaaagtggtcctacgttcagggagcttacagtgtagcaagtaaaagaggcgttaagtgactaattgcactattccatatttatttacaaaaatataatctgtgccttgaggaagccatgcagagtactgtggttgggaaaggagagaaggtttccttgaggaaggtgatgtttgagattactagcaaccaaagcttagcaggaagtggggagaatatcccagacagaaggaagaacacttgtgtgcagaggcctttggcaggaaggagcatagcaggctccacaaactgaaatgacgccatattgccatcataataaaatcaaaactgctaagcaaggcctgcaaggccatccatgatctgacccctgcctgcctgtccaacgtcagccccacccccatccttccttccctttctcacatccctctgaccacagggttcttgtttctgttcctgtgatatgcccagcttgttcctgcctctgagcattcatgttctctgttccctctgctttggatgcccttcctcagctccttacatgactagctgtctcttacccatcagatcctagcttggcgtcaccttctggaagaggcctgccatggcctttctattgtctaatgtggccttctctgaactcttcatgaccctggtatctcaagctccgttttctttggaaaatctgtctcaatttgccattatctctggtgctttttaaacgtgcatggaggtgagctagaatgtcggctccacgagggaagatgcttgccctggcttgctccctgcagttaagtcccccactccctcgtgcctggtacaaagtgactcccagtaaatatttgttgattaatagaaataaaaagaaaacaacacagaaagaggaaagaagaaaagagataaataaatagagaaagggaggaaggaggcagagaagtagccagctcacttggagtacatagtacacagaagtcacatggggtgatattagggtgccgtataagtgggtgtcagtgtggccaagcatggtctttagtgggccagcagccagtgctgggcaacagacaggattcgcatggcagggagcatataaatgcaaggatagggccaactgctgagccagggagcacattaactcagcctaactcccagcattgcaccgtttagcacaaattaagttacagcctttaaaatggggttgacaggtcgcaagtctggtctgctcagtctgctgtactttaatccaaatattcttctctccggtggtaaatattcatctgtaaccttttcattatgcttgcctgccctgcgtacctgctctaccatggttatttgcaggatcaaatgcaactggtggtgggctgggctggttacaaatatgaatttggttataggcgagacataggattagttctaaggcttttctaagtggatctcctgggattgaacagctctgtggccttttaacatgaggcaagggagagagtacgtgttcctgggacacaacatctcccctggttcagtgccaggaggcaggtgcaaaagaaaaggggaagggctaatatttgctaaatgtccttttcttgagactgagggctttatatcctataaaaccctctaaggggagtgttaattttccctatttcatggacaagaaatatgtggggcagagatgtaaagtggtttgcctaaggttacaaagctagttagtgatggaactggtacttgaaccccatgatctgtctgtttcaaaaactatgttctagtacatcatcctttttaaaaagattgatgaacagcattctctttattaactgtttaccatgtactaggcattttacacgcattgttgttttaccctccaatacttatacaagttaggtattattgctttcctgcattttgctaataggaaaactgaggctcacagaatttaagcagcttgcacaaggtcacaactaggaagtgatggagcttggatttgaactcaggcctactttttgacaaaacattgagttcttaatgctctcttctcttgccttcacttgttaaaaagctgataagcagtctgagagggtgacagatctcatttctcacttaggtatccaagtaggaaatgataattgaaagccaaagtctctttgtagggagtctgcagttgcccagccctctggggccccagttccgcgcatacattcagcctgtggcataacaacctcaccagccatcctcctggtacaacttcaggggacttgtgtcacgggcttccctaggacagatttggattctcctcttgggccaacaccagtggctaagatcagtaaacatgacctagaaccttctctaaaacaggggtctgcaaactttctggaagggatcagatgggcagtatttgagtctttgtggcccatgcagtctctgtcacaactactcagctccgctgttgtagtgggagagcagccactgaaaacccaaaaatgcgcgggtattgctgtgttccaataaaactctatggacactaacatttgaactttctatcattttcacgttacaaaatactctttttccctccattgaaaactcttcttagcctctgggccttacaaaaacaggcagtgaaccagatttgaccgcagggccatagtttgccaacccctgccctagacttaatccagagtgattttcttcccagagcaggctgttggccacatggcttgagaaagaaaatggttttcctgaaaatcatagaaataccttcactgagatttattcattcgtgttaaacattgccatctcttaagaagagaaatctatttaaggcagaaacaggcatcagaagtaaatcaatgaaacacctaacttcttagcatagagtaagttcatcagacagaggcaattcaatttaatttggaactaggttttggtcatttcttatgtgtgaaagaaccatagtctctgccatgaaaaagctcacaatctgggcaggatggagggtgtgaggtgggctggggggatgaggaagcctacaaggagctggagggtggatcctaagagaagcaaagacgaaggctgtggaaagccaaaggaaggaaaacaactcctaactggggggtgaattgttttcatggactgtggtatttgacatctgtccaaagggttcacaagagagggatgctgataagggaaaatgttccaaggaaaggaagtagtaggatccattggatatccagataatgatgaaaaaatgggtgaaggccatactggcctagctttgaatgctagccagaggagttcttgattccttagttggcagacatgtcaggcccaggaaaagattttttggagtcatggtggtcattgggtagaatagagggaggaaagaccttgaatacctaaataaaagacgtgggtaaagaagaaatgggaggtagggaaagggaagaggggtcaggagtgggaccagtgaccgctgacttttttcattcagtttgccatattgtcagcttaaaaggactaaagacagacctagaagaggcatgacaagggtctgacccacatagtgcttttccaatatctgtgcctgttgcaggcatcactaatccaccatgggactcttttccactgtctgaacacagctccttaccatcctgccataggcagttgctttcaaattttcagagttggggtgcaaaatgacatttatttgcatattctatagcagtgcttcacaaattttagcatgcatatgtttcacccaaggatcttttacagatccggactcagttggttctcagatagtccagagtctccacttctaacaaacttacgggtaatgctgacactactggtcaaagggccgcctttgagtagtgagtccagagtgaaagaattctgagcttagagttagaagacctaaatacaaactcggatctgttcttacaagttgtgtgaccttcaacaagtggcctggcttctctggcctcgaaggggacaatttaggttaataaggcaactcagtggaattgaggagatcaaatgagatcatgggaagatgtactctgcaattgatttgagagctataaattcattcaatagtattattattaatgataatatagcaatgatgatgattaaacaccactagacaactctgtttgtaggggctgagccctggcataaggttgcagggtgacagcactgataaggacctcagtgactaactagtcattagtgcctagtgggcagccagcaacctgaggttcatcattcagtaaaaatgtggccccataaaggctggcctggaaggtctcagcaaggaccagctatacttaaaactgtccccgcagccaacagatataagtccttaactacagggattccagatatccagtgcttcactgtccagcctgtcttggatgaacatcccaggttcaagaataagccagtgcctgaccagattataaagtaagactcgttgtccacagggaagaaggatggggaagagaacccattggggccaccaaactgagctggtggcagaacagaccccagtgtctttctagttccttctctatcttagccagtttttccccccttttcctcttgggcaaagaatcaccctccaattagctgggctctgcccctgacaaggctgaagccaggaaggatgggagagccagggttatggctcagcaaatcctcagcaagcatcgagcatttgctcaactggatgcagtcagcctatttgttgctcaggttgatctcagagtggccccagggagtccacagacagagtgtggctgggcaagtgataggcagggtggagacagggggccttgtccatgctgagcacatgctcccagagggacatctcctcagcatttgtgaaggttgtacattgacaatggtgtgttcaggctctgataaaggaacagtagaggaagtgccgtgaaggctgatgtccacctgttctagatcagattgcaaagtcactgatgaggccacaaggtggggcctctgtgggacccaaggctgtatgcctcccagctgcccagctcattccccctaccccatgcccaggttgtaatggagcacttgagtgtcttagagtaggtcctcccctctggatgggacagtcagaaacaggatctgctttgcaagatgaaggacccttcagggagaggcagcccctcccagcagcctcacgaagtgccacagcagagcaggtggagctcagcttgggtcttaacctcccctcaccttctcaccttctcagacaggcacccatgagcaggggacaataactgtgcagctagcacggtgttctgctggccctgaagttagaatctcaccaacgattcagggagactgatttagggggttggctgggacacctaaagaaatcctttgaggacacctctgggaaattaggctcagacctcagctcctttgttgcagatcacaggaaatcatgacctaggccatcaatgttagaattccaattgcctggatactctaggggtactatgttctcaaaggggcacaagaccagtctaccttctaaattgccttgtcaggaaagcctgtgcaaaagtcactcttacggagcccagaacacagaccttgattttaaatgcaccacaagggactctgccaggcctgaagtttactgtaatgaacctccctggacagtgcagggtcagatcgggtgtcagcagccggggatggctaccaggagcctcagcctcttcctgtctttcagcttctacaaatccaactacgtgcaaaggttccactactcccggcccgtgcgcagggggaccgtagacccagagaatgagtttgctgtgagtatcttccctacccttgatcattccctggagccacctggaggaaccagagcatgcatcggccagcctcagaatgggaaggaacttgatagaaagccagagaaaataaagccaacctccatggataccatgacgtccgttccccaatctcttccattagggcctgtgtccttatttcttgagcctttttccccttaatacagaacccaggcctcatgtcagaggcactttttcaaccacagggcattcaggcattgccagcacgtagaaaccctcaggctaagaaggggtgttgataaaatcaaaccttccagcaaacaccagtaagaagccacagcaatgtagtcatcactgtcccctgagtgctagtctcctctgtgtgtgtccagctaggattcaaacaagactggattaaggaggtgtctccaagtctcagctctttggcctggacagtaattcttaatatttttggagccactgcctctttgagagtctaatgaacactgggaacccttccccgagaaaacaaatggacacattcaatattgcctaaaaattcagactgctaataaacccaggttagtacttacttggcctaagtccagggagagcttacacttaatgttgggaaagaattcttaagggtaaggtgagagcgtgtttctgggtcttgcaatatttattctgctttcgggtagatgggaggcccggggacctggctgggtttctgccaagcttctccgatacccaggtttcataaatgtgtttgttgctttcctgcccttgccacccctctgcccacggacagtccatgtggattgagagaacctccttcgtgactgcatacaagctgccggggatcctgcgctggtttgaggtggtgcacatgtcgcaggtgagtctgggacattcgtggcagggccacccttcctccgatgggcagggcacagccagtctccaaaggcccctttgactttaaaaaggagacatgtttttctttgaagctgctgtgtgagtcccagaattcccatgcaggcagcattcagaatagtgcctttcagattttttttttttttaagcatcagataacctttttgttccctgcaaatgaaactttccatggcctccagtaataaagctgatgaatggggagcttctgttgggtgggtggggtgtagcagagggcctggaacacaatcattaatcatttccatctccccctcatactcctctcatcacagcacccccttgggggcacctgtgcagtatcccaatatgaatccattttatagttggaaaaactgaggctcagaagggagagatcatttggctagaatccaaatgtttgatctcccttgtgcagataacacctattttgcttctcagcacagcttagggtctccacgtcctcagacagctaaagatcttgcagtccccaagatacagaggaatggtcagtgtggttgtgaggaaaccttgtaaatggacatatttaggatgtcttatttatttatttattcattcattcagaaaatacttaatgtgtacctaacatgttaggcactgttgtaagacctagagattctgcaatggagcttccattctagtgggaaagacggactaaaaagtcaaagtaaatatatgacaggtgataactgtgatggaaaaaattaaagcagaaaggtgatatatgagggattgctattttaagtagggtagtcagagaatgcttccctctatactggctgttgaggagaggcctggaggaaatgaggaaggggtccatgctgacattgaagagagagacattccagcagaggagacagcaagtgaaaagccctgggcccagagtatgcttgtgtccagatcagaacaagtgagggtgagtaacagtcatctgataccagatcatgtaggaccttgtagaccaccataaggactttgactttcccactgagtgacacagagccatgagcagaggagggacgtggtctgacttgcgttttcaagctattgtatcagacgatagcattgagaccgtttcacttctacccttaatgcccctctcttttcagcgaacccagcagctcagtagcccttcagcctcctttttataggcatgacctagaccttggaaaagtataacaatgatggtgatagcaaaaaacattgttttgagtatgggctcaactgttcatatgcatgatctcatttcaacccctcagcaaccctgtgaggtagatattattattcttcccattttacagatgtgggaactgagatgcagagttaattagtgcattgttcaaggttagtaaaagagatagggtatgactttaacctcccctgtcaggcacctggcttggactctttatctttttttccttaagaaaaagaagagcccaccccagcccaccccagcaagtagtacccccaaaaggaaggaagtgtctgtgcccttgcttcatggcacataagtttcaacaagtgccccaggtgctgtgtcaaaggtttatagctatatctcatttaattctcatagaccccagtgaggtacatactattatgagccctatttaggaggtaaggaatcagaaactttctgtcaatctgtagcctctgcccattagccctgactgagccctgtcacctggtggtgctcagcaaggcgcctcttctgtagtcattcctgccaaactgtagcaaactgagagagcccatccctgtacttcccattccctcagctactgtgtgtcagcccaaagcacttatctcctaatagcctacataattttcttgtttatttttaatattaagagaatattaaatataacagtagaccataagctccactagaatataaattccaagaagacagatattttgtctattttattttctgccatacctccaagtgctaagaatagtccctggcccacaactgatgctaactaaagaatacttacataaattaatcagtcaatcaatatgcagacacccgtaatgtctaaaccggttaccttattttataaactcagcgttttgaagttgggaaagaaatagtcaagatttttggcttgtttctttcatcccgatggcttctcatagatggcattggggaaaccttcaaaaagttggccagagtgaatttatctttaatggcctctctcagatgagttaccaggaatttcagggtgtctcagatgcaaaagttgaatgctcttctaagtgacttcatttccaaagattgtttttgtgttatatgaatttgtatcttgttcttggttatttcctccataaattatcatgactacagtaatgtttatatagacaggcattttctgatgagcttcaagtataagttctgcctattggggttttattttgttcttgttcttggccctgagaaatggagactttacaaggagccctgatctaggggtcagagatccaaattcaacgtggtcactaatgagctatgtatgttagataaggactgtatatctctgggtcttagttttaatcatctgtaaataggaattgcaaaatgatggaactttagggagcttaaagggaccttaggtgtcttttagtcctaaagctataaactggaataccttcatagcctagtaagggctgtggcaaagtgcagtagcaacagccccctcctccatctctgttgaattacatttttaaaggctagaatcaatgtgctagctaagtgacagacctccgccagcctggtttggcttgcagttctccaagttttttgtcctgattcttcctggttcttgtctacctgcattattttgtatatgagaaaactgaggcctagcaatgggacttgaactgccaaagcaatttgtggcagaactcagaggtcatgagagagcacctgtcctgtgcagctcataggattcctgggtagacttaagaaggcaatattggtaaaatggctttgaaaaatatgaaatgctggggtgggcgtggtggctcatgcctgtaatcccaacactttgggaggctggggtgggcggatcacaaggttaggagttcaagaccagcctgaccaacatggtgaaaccccgtctctactaaaaatacaaaaattagctgggcatggtggcatgcacctgtaatcccagctactcagaaggctgaggcaggagaatcacttgaacccgggaggcggaggttgcagtgagccgatatcatgccattgcactccagcccgggcaacagagcaagactccatctaaaaaaaaattaaaaaaagaaaaatatgaaatgccacctaattgccagggattgagatcactttctctttcatcttatgttccctcacccatccacacacacttttacatttttttccaaagcaccctcccctgataattcattttctcttcacagcaagcctggcaagagttactatgtcgataaagaaactgaggctcagcttagggaaaagaccagagatttgagggctagattaagtcccaacagcccgttgatagcaagtgtggtatcaaagcttgatttacgtgtagtagaagaagcctgcctttggaatcacaaatacccgagttgtctttccagctctgccccgtggctcagggataagtgacttaacatattgctgggggaatgaaatgagcatgggtgtaatgtggccagcatgggctggcacataggaggcaattgataagtgaggtcatcttcattatcatgatcattacttttattcctgttattagctaaaccgtgggtttaacttctgaaatctaggcctttcaccaactatacaacccctgtaatgacctgaaagttacatatttggtttatacaaatgcccgtaggcgagaagccaaaattattttcattctctttctctgttcctaatggctataatgaggctaacactttgggaatctaaaaatagtttcaaaagcaaggaggaaagccaatcaactgctctttccatttttaatgacttgtcttaaagcctgagtctttcagatatggcagtctattgttcaaatgcaggtgtgttgctgggctcaatctgagcggtggtgatagattttcagtacaactcagtctacaccttggcccctcagagcccccccagagttggtctgtgtacttgacagatactagaccgtgggtttcaccttggaggactatggctgcagccaagctggacattgttctccttcagttaacattatgtgtgtgcatgcatgtgcagttgtagggtgtgtgggtgtgcccagggtgtgcatgtgtggatgcatgtatatgtgtatctatgtgtgtatgtatatgagtgtgtgtgtgtgtgtgtgtgtgtgtgtgagagagagagagagagagacagagagagtgagtcagtcaattcccagggccttctcactgtagagatcagtcatcttcagaaacatccagactcagggtaagggagtaaggaggctataatttcacagaaatggttttaaaagatgaccaagaagacaattagcaacatagcagactaggaagctcctgggtctccctccacccccaaatgcaccagataaatatctactcatggatcaattccctctgagagaaactcagagatgaagtgagggacttctacctaccaggcactgagtaaacatccacattgaaccgatatgaaaagctgaggcacactcaggcatgcaccctgctctgacactgtgctataaaatcaggaaagaaattcccagtactcatcttctctccctgtggagaggagggcttggacctcacatatactaccctaattctaaggttccccaggagggcttggacctcacatataccattctaattctgaggttcttcatgggttggctcttaacttatcaactctgagactgcgcagagttagacatatgcaagtctctttagaccacaggaaaaaatcagtggttttatatgggtgcacatgaactttcaggcatcctatcccctgagaggagtgtagtaaagggtcttttaaaaatggaatcccctgcttctccccagaaggcatttatggcacactcttccagtggctacttggcagcctggcttctacataacttccactgaggagttaaggggcaaacaaatattaacccactggcagcctgagaagcaggctgtcacttctcaaaccttgcctcctggctcaccctagcaataactacaggtttattaatctctcctggaaggagtctgtgcacacattgagtttcccaacttttacagcttccacccaagggctatattctaaacaccttagctctgggagcagaggggactggcatatgcatgtcgccaaagaccacaggaaaaaaaagcagcagttttatacaggcatgaaagcacttccagggcttcattccctgagagttggtgcagagaaagggcttaaaaaattgcaaccccctattcctccctagatgaggtttatgctatgcattgaatgtcccaacttttagatctatttctaaaaggactccatctaaacctcttagctctgggaacagaagggagcaggcatatgcaattctccccagatcacagaacagagagatggttttaaatgggtgcacaaacacttccaggggttacatccccttggagcagtgcagaaagtgggcagaaattaacagctcccattttctttctggaaggggcacacacttccagtggctacttgatggcctggcagctaacaaacttgcatcaggaagctaatagggcaaacaaacaatagctctccagcagccagagccagaggttggcacttcactagcctttcctctgtctcaacctagtgataaatccaggtctatccattcttcctgcaaggagtttggccacataccaagtgccacactagagctcccacccaagggactgtcctcttaaggatatagctctgggagtcaatgggactttgtcttcctgagtggccctagaccacagcaaaaagaggtggatatacaatgggtccaatttcaacaactatatccccagaagcagagggtgcggcctgaacctgagtctaggcacttgccacagattctctccccagcttagggcagagagagtgagaggtaatcgcccatgctcagcttcaccatgaagatggaaaaaactggaacacacatttaatacccccacctttccagctacatctagagagtctagcccctgccttatctgtcactgggtactgacaggaagtggcacatcctaaactataggggtctacaaaaaacagagacagcagtctggacaaacagagagatttgagaggaaccctaacatttcacactggatggcttggtcagatccttcttctacacaaggccagtctgacaagactgggagagagagctgtcttatctaatgcagagaaaccaacacagacactgaaggaaaatgaagaaacagggtaatatattccaagtaaaggagcaagataaatctccagaaaccgaaatgtgtggagtcaagacatgtgatttactcagcagggaatccaaataatgctcatgaagatgctcaccaaggacaggagagcaatgcaagaacaaaccgagaattctaacaaagagaaagcataaagtgtaccaaacagaaatcatagagcttaggaatattataactgaactgaaaaatgccatagaagggttcaatagctgactagatcaagcagaagaaaggatgagcaaactcgaagacaaatcactggaaatcatataacctgaggagcaaaaagaaaagaatgaaaaagaatgagactggtataagagaattatggggcaccatcaagtgtaacaacatacacattattgaggtaccaaaataagaagagagagggagaaaggaacagagaacatatccaaagaaatgacagaaaacttcccaaatctagaaaagaaactagaaatctagatccagaaagcccaaaggacaacaaatcagataaatccaaagagaaccaaaagtatttctcaaacaaacaaaagctgagttaagcaccattagacctgccttataagaaatactaaaggtagttcttcaagctgaaggaagaggatgctagttagtaacgtgaaaatatgaaaatataaaacttagtgttaaaaaataagtacattgtcaaatccaaaacatgctaatactttaatgatggtgggcaaatcaattatctagtataaagatttaaaggcaaaaaaaatataaaaagacacctaaagctctaatagtttgttaaagatagaaattatttttcatgtaaattgtgacatctgaaacttaaaacatgggaggagagggagtaaaattgaagtttgtgtatgtgatcaaagttaagttgttttcagctttaaatagccagttatatgtatgttttatgtaagcctcagggtaaccacaaagcaaaagcctataatagatgtacaaaagttagaagaaaagacccacagcatatcactacagaaagccatcaaatcacaaaggaagaaagtaataaaggaaaaaaagaacaaaggatctataaaataaccagaaaacaatgaacagaatggcattagtaagtccttacctatcagtaatgactttgaatgtaaatggattaaattcaacaatcaaaaggaatagagtgactgaacaacaacaacaaaaaaacctaatgatattgtatattagtccgttttcacattactgatagagacatacctgagactaggcaacttacaaaagaaagacgtttattggacttacagttctacatggctagggaggcctcacaaccatggaggaaggcagggaggagcaagtcccatcttacgtggatggcagcaggcaaagagagagcttgtgcagggaaattccctttaaaaaagggatcttgtgagacccattcactatcacaagaacagcatgggaaagacctgcccccatgattcagtcatctcccactaagtccctcctacaacatgtgagaattatgggagctacaagatgagatttgggtggggatacagagccaaactgtatcagatatgttgcctacaagagacttacctcacctttaaagacactcatagactgaaagtgaagggatggaaaaatatattccatgcaaatgaaaactgttttttttttttttttgagacagagtctcgctctgtcgccgaggctggagtgtagtggcgcgaactcagctcactgcaagctccgcctcctgggctcatgccattctcctgtctcagcctcccgagtaactgggactacaggcgcccgccacaacgcctggctaatttttgtatttttagtagagacggggtttcaccatgttagtcaggatggtctcgatctcctgacctcgtgatctgcccacctcggcctcccgcaaatgaaaacttttaaaaagagagtaggggcagctatatttatttcagacaaagtagactttaaatgaaaaactgtaaaaaaaaacaaaacaaaagacaaggtcattatatagtgacaaaggggtcagttcatcaagaggatataaaaattgtaaacacatatacacccaatgttggagcacctaaatatataaagtagacattaggagatctagagggagacataatgttagtagggtatttcaatacctaacttttcaacattggactgatcatttagccagaaaaacaataagaaaacattgaacttaacctacattttagatcgtaatggacctaacagacatatacagaacaatccaccccacagcaacagcagacacatttttctgaagtgcacatggaacactcttcagtatagatcgtgtgttagaccacaaaacaagtcttaacaaatttaagatttttatttagtttgtttctgtttagttcatgggtcagcaaactgtggcccatggactaaattctacccgtcacctatttctgcagttttattggaacagccattctcattcatttacatactgcctgtaggtgcttttgccctacaataacagagttgagtagttgcagcagacaccatctggcctgcaaatcctaaaatatttactatctggcccttttacagaaaatgtttgccgacctctactttaggtttctactccagatctcatgctcttgcaaactgcactttttgccggttagcttttgatggcactctgtttatatcgccttctaagaggtgttggacaggtgttctgtttaattttcccaactaaagtgaatctaccttggaacagtgaacccctctaacaaccagtcttaggacctactatgtgccaggctgggtgcccacatcgcaagctgctctaatctctctggccaataactcacacatagtatctgcccaaccaatactgaaagggttgaattggcatgtgtttcacccagataataagaagagaaaaccttctctggggcacactcagcaggtacctgacacttcctgcttctgcctccccaaagaaatccctttctcactaagcagaaagccagcctgtctctccccagagagcagacagcccccagagctcagtaattacaagatcctgttacagccccttagggagcattgcctcatttgaattcccaccccaagtgaaatcaataccaataatatctgtttttaaagtgacttaactaaggccctttcttcttggtgatctcattttcaacagaccacaattagtcctctggagaatgccatagaaaccatgtccacggccaatgagaagatcctgatgatgataaaccagtaccagagtgatgagaccctccccatcaacccactctccatgctcctgaacgggattgtggaccctgctgtcatgggaggcttcgccaagtatgagaaggtgaggatttctgttctccaagtctaggggagctcggtgagcagagcagtggtgggaggacccagggggcagatgcaggtacatgtcacttatcctactttgactgtccttgtccccagagggaccctcagcttggttggccctcatgtttctatagcctcatgtcttagctgagctcctgtcttcctcccagcctcttttccataccctgtgctggggcagggaggggcaggaaggggcaggggtcataaggtccccttatctcactgggcagattcaggtggctctattaaggaaaggctctgggatgagtgtgagccagaccataaaagtacgtgccagttgtataaacccacctcttccacagaggatgtgaaatgatgtatactaatggaaagaaatgaaactcagaatctgtgaaaagccataaaaactaagagatcaactccaaaaggggagctataatctagatatcaaggtcataaggtccctccagaaagccccacatgtttgagccacagatttatttttgagcttcctggtgttcacggcaaaaaaggaaatagcatcacttatatgagttacattatccactggaaggaaaaatacccatttctcagtaaggatacgtagctgttcttggcattgaaatagagtagaaagttcttacttggttttcacctagcagacactgaaggaaaaatgaactcctcattctaacaaatcttttgatgaattccctattatctttcctatgttatccattgatgtaaaactaagaataccacacagtagtataatttggggacaataattccagtcacctaatcaatccttccaactaccctcagatacccatgcagtcatcattggtaaccctttgctcagccttgagcagtgatgggatatgtctgtttatacatgagcacacactaaggacatgagccccagaaaggggctgccagggtcacttgcaatgagggaggccatgaggtgagctggaacacccaccagtgagattccttactgaattattttccacagagcaatgttctcaaacttgaaaggagcatcagaatcccctacagtgcttcctgacacacgggtcctcaccccacccccagagtttctgattcaggctgtctgggctggggctagagactttgcatctctaacaagttccaaagtactgttgctgctactggctcaggaacctgactttgagaacagcttccccagagtttgcagcccattcccactgggtgctgatctgagcctcaaagcagataaaacaatgtcagtctctccagacctgttactcttgttccatccacatgcctgtgacctcatccttgcccctttcaaattgaatcttctcccagtgccaaagagattggctgtgaaatgccacatgaacaggaaaccctgacctcctatctgtcctccccaggccttcttcactgaagagtatgtcagggaccaccctgaggaccaggacaagctgacccacctcaaggacctgattgcatggcaggtgaggcagcgctggccaggggagcatgctgctctccttcctctccccccaccgtggttcacttgccccacgctaggctctagctgaggcagcctgaattcacatgccctcctgtcccttgcttttcagcccctcttccaactctgtatcacacctgagcaggttcatcctggaacagagatttggggcatcgcactcttgggtgttgcatggtgccaggcagcaatgctatgctggatggtgccaagattatcttatttgatgttgaattcaggggatggcttttcacagcgggatgcaaataaacaccaggcccccacactccaaaccagcaccttcccccgacacccagcacaggccaatctgataatagaagacttgagcccctactcccacttctcctccttttagagctgacccactttgttgcaataatgctcagatggatatcaggttttgaaaataattgaggcctttgtgtgggtggttgtgagtcaaagggtctacatcccacacaagccgctgctcagcccacgggcttagaagttaccaccctgctgtttcgggctggccacttacctgcctctccttccattctctctttgcatccctcttcttcctgtggactctgtctttcctcctttctctctttctctctgtgcatctgtctgtctttccctctctctcttagaagcctgcacttctattccttgcctctctgtcttttgccccccacccccacacatcttactcctctcttggcttctcttcctcttctgtctcattctccatctccctgcagaagcaacagtcggctagatccctctcatagaggcttacacagggctaggcttccctccaggcccagagcagccccctcctcagacattcgcccactctgggctctcagcaaaccacccatcagaacacaggggtgggctccggagggcaggagctggcgggaggtgagcagtggatgcaggggcaggtggtagcagcttgcagctgcctgccctccctcgctttcttcttgccagtcactgtgcaaagaaaagcaagcttttgtggttgggagtttttgttactctagggaaatcagggaatgagaagcattgggtgcagcctcttttcttaaaataagaattcctaattcaggtccttctctgcctctgccaatttatgcaaagtggggctttaaaaatgaaacaccaagcactgcacagacgcgcttttcccgaatgcatgttgtgtgtctgtctggaattttctctttctttttaccttgtgccacctgtgaagcccaaatatcccccaggtccccagccttctggggtcgtcatgccctttattattcaaataatgatgttctcccttagcatccccagtttgggaagcaggaaggccaggctttgactcgttcccatcctcagatattgctgggaggcctcagggaaggctaacatgtcatacagatttgcttagttgttggatgtcactctgaatctatacaattgccctggtcctctccactggggacctcttctcctctggaaacagcttctccatgctgtgtttactgtacccaaagaatgaactgcagcttcacagcacagcgaataccaagctgtaccttccaagaaaattctactactgtcttggagcttactagagggacattaccaacaaagccggaaggctttgaaagcatgtactctattagatgtggcggcttctgagaaccgttagctaggcgccttcagacaccgccccctagtggccgccttctccttagcaccacccgctgctcctgagaccacctatacagaggcccacctaacccccaaacgaggttgacctcagccatatccctcccacccagcgcccaggcaccctaactatgggcacccgcatgcaaaagatgcagtcctgctcatagtgaaggcagccttttaacattatcacatgcagcagattagctcttccctacctgtttcattccgtttgttcttgcaacttatatttattgagcctctgttgtgtcctaggcaacagtaatagtgatggacaaaattgggcctgctccctgctcacttggagcttaattctatgttggattttggttttgcaaagccaaatacactttgaatttacttaaaacacgagaaggttagatttcaaggggagtgaatgtatttgtacctctagcaaccgaacaaatgctgaagccttcaaagtacatttggtgttcaacgtttttgcagatttcaagatcgatagcttgttaatttattttctttctgaagactttctattttttggcataaaaagatgtctatagtatgctcttcttttaaagcttttgttgtgaaatattatgtacagaaaagtacacataaaaatatataacccactgatttatcaaaaacatacatccgtttgaccaccacccagatgaaatagaattctgctagctcccctaatcctatcttaggcctccttccctaagagtgagcactgttctgtttttatagtaatcatttccttgctttaaaaaaaatactttaccacccaaacactcattcttaaacactatagtttagatttgcttaattttgacctacatataaacagaatcacataatatacagtctttcgtatctaacttattttgcccaatgttatgtttgtgaaagtcattcattttgtttatgagtcataactatgattcacattcattttcattgctatatagtagtccgtacagctggcttatgtaactataccaaaatgcatttatttatttttatactaatagagaattgggtttatttcagcttggggctattataagtaatgctattctgaacttccttgtgtgtttttttggtacacatatgcaaaatttttgttgggtatatacctatgcattgatttgcttggtcatagcatgtgaggatattcagctttcataggtactgccaatcttctatcaccataggttaggttattttgcctgttcttgaacctcttataaattgtattatacagtacagtatgtactactgtatctgtagcttctttggctcaatataatgcctttgagattcctctgggttgttacacatactagaggtttgacttttttgttgtttctaagtgtcatctattgtatgtgtatctaaattaccaataatatatcaatttatttatccgttctgttggacatttggatgttttcaggtgttgtatattatgagtaaagttgctatgaacattcgtgtttgtgccttttggtggacctaagcacccagttccctcagtatacatgcagtagtggaattgctgggccatgcacatttaaccttactggacacaagaagcagtttttcaaagtggctaaatcaattttcactcccacacaacttctaagtcagttgatccacattctccctgacacttgatactgggagtcttttttaattctagtccttctggtggatgtgtaatgatatctcagtttagttttaatttgcatttccttcatgagcaatgatgttcagcaccttttcatatgcttactgctaattggattacccttttgtgaaatactttttcaaatcttttacttatgttgttaatttagttgtctctttattattgatttataggagtttatatattctagatatgcatcttctgtcaaatatatgtattgcaaatatcttctcttagtctggcttgtctgtttgctttcttaatgatgtattttgatgaacagcagttgtaattttggtcaggtttaatttatcatatttttaaatgattagtgcttttgtgtccactttaagaaaccgcaactaccccaagatcatgaagatattctcctatgttttattctgagtttttattgttttgtcttatacatttaggtgtatgatcctttttgactgatgtaaagtaagaggcagattattttcttacacagatttccaatttctttagcaccatgtgttgaaaagactattttcccccacttttgaccccccaaattgaccatatatgtgtttttctattctggactttctattctgatccatcggtctatgtccatgcttataccaataccacaccatcttaggtcttgaaatctaatagtcagtgtaccccaattgttgcttttcatcaagtgtgtcttgcctcttctaagtcctttgtatttctctataaattttaaaataaccttgccaatgtttacacactcctcccaaacacattgagatttggattaattgtacattaactattagattaaattggagagaatggctatcttctcatccatgaacatggactagctctccatttatatagttctttaatttctctcagcaaaattttgtggttttcacatattttattttctttcatatatcttattagatctgctctttggtatttgatattttaaattctattgtaaatggtattgtttttaaattttattttctgtttgttaactttttgtaatacactcatcttatgatcttttatgtttgtacttcttgtaattatgtttttcaatcctaatattggttattagtaccttgtattttcttgattagtcttcttaggagtttgttaatgttgtatcttttcaaagaaacaaattttggctctgttgatcctctctgttgtaaatttgttttctatttttattcgtgtccactctcacctttattattttcattccttttctccctttgaatttagttcgctgttcttttactaatatcttgagatggatgcttagctaatttattttctgtgttttctaatatgtaaaactaaagccataaatgtatctccgtttacaaccttatctcactactatttatatgtagtttttccattagcttccttttttatataaaatctttgtctttttcatgaatgaaggatcttttctgttcctatatattagttaaattttttagaaaaacatgttttcttaggctctctttattctatttcttccaaattcattctgttttttcttcctttattctttccttcttttcttccttatttgctttcttccctatctgttggtctggtctctgtctttcctattggagactttcctccagtgtctggtgatacttggcattctcttcatagttaagagcaaggctaaagaaaaagaaaatctgagtacaagagagagggccttggcaactgggtagcattgctgtgtggcaacggaatgacccacagacgtctctctctacatgggaccattcacattctccagagtcagacccttcaagctgttatatagaaagataatcccagctgctactctgctggccatttgggaattgggaagtggagctctcaggacccaaatgcagactttctcttcaacttcttatttgcagtctggcttctgcttctgccttctgttgtgcctgatgcccctaagcccagagctccttgttctaattgttctagaggataaactcctccttcttgggaaaatgggaaaaaagaacacttggctgcagggtgaggcagtcaggcaatctaactgctcctgatacagaacttcaacacattcctctgtgtttggcccctcagctcacccgccttctctgtagtacctggtgcctccaatctctgaggccctcctggcttcatgtaggcagattggcttcttatcaccacctccctcctctgctctggaagctctggaaggtcagttatgtcctcccacctcctggcacacatattgtgtggcaggtttatgaatgtctccaagtttcactgaagatttcagtttctccttcaccttgtcatttctgggagacctccaatagaagtaagcagaaatatctttatgtcaccatcatgaaagcaatttttcccccaagtaattcataatctacccctttgctcccctggttatgtttccctgagaccacacaactaaagttctcagttctctttctgacagtgcccaccatggctctgctactctcccttaaggtagctgacacttagacagtatccactgacctcctatggggacaaataagacttcaactccctcacatcaatcctctcttcttccctcatcttcctaaggcttttattatcatttttcagagctccctactggggggttaactttatgatattagcacattcatatccttcttcagcagctgtatgaagtgcaattggctccatgtggtaagatgaggctatgccccctcctctgttttctctcagctcttgccttcctctatctctcagcttctgacattcatcctttcactttagtattgccaagaacatcttaggcaaggttttaaatcaatgcaacagagattcccctcctctgatccccacactctgcccccaagtagattctttaagggggcaattttcccaaccatgtggcctttcatggggaagaggggagtccagccctcctatgaggcaagggaagctgggggtctttctctcctttccagagcaaacctcatgtttgcaactttccccatttcccatggctggggaccgtgtgtgcaggtttctgaggaccctgaagcccttgatgaattcttagcaggcagacttgactgcagctgccttgatgggcggggtgccaggctgaggcccaccggtcagcctctggctcattctttaccactttctctccagatccccttcttgggagctgggattaagatccatgagaaaagggtgtcagataacttgcgacccttccatgaccggatggaggaatgtttcaagaacctgaaaatgaaggtggagaaggagtacggtgtccgagagatggtatgggtggttcctatggcttggaggggtgggattgtgcagggtggggcagggaagcatgctggaggctgaagttggaggggatccagcaaaggaagctgcttccaaagagaagataatgatggccagcattgctggatcccatccaggggaaccctcctggaaacttggtccagcaaaagtaacccccagacaaactccagttacaactggattgtgcagataccaactactcaagggactgtgtaataataatgaaagctacactgatgcagcatctactatgtgccaggcctgattcaagcacttgacatctactaggtcatttaatcctcaccacaagcctgagaggcaggaaagatttttaatcctttgtatttcttctgaggttcagaaggtcaggcaacttgccagaggctatgtggcaaatgaatgtggggcagaatttgcatctggctctgttagtttaaggccagtgattttgaccgctgagctccttggcctaaagaggccatgagcctggtgcttacggggtgcttcttcatccttttccttattaactggtgttataaaatgtcaaggccatgcaattcctttaaaaccatctggtccagccttcccattttacagatggtaaaactgagacccagagaagaaaagtgaattactggaagaacctacagatgcactcaggtctcttgattcaaagatttttttccatgaggcagtttgtcactttcaatactccctacatgaagtccctgtaatgcaattctggtgctaactccctggagttaggtcacatttcacaggttagaagcacagtcttagacacttcccacttcaaacaccaaccataagcttcagggacccaggccacccacacttctgcctaactggttacaaactgggagattcccactaccccatcaggtttcataattcactagaataattcacagaactcaggaaagcatgatacttatgatttcagtttatgatacaaatcaagaccagccaggtaaagagacacagagtgaggtccaggagggtcccaaacatgaagtttccacgtattccagatgcatcccccttctggcacattgatgtatgattaccagccagagaagttcactagagcctaatgtccagagtttttattggggttttattatgtagtcatgatagattgaaccattggccatgtgatggaaatcagtctctgggcctgtccactccctggaggttgagctgataccacatggcttaaagccccagcccagccctataatcatagagctggtctttctggccatcaggagccatcttattagcataaaatcaagtatggtcaagggggccaccatgaataataacaaggatactactatcacataggaaattccaaagttttagatattaccttccaggaaccaggagtaaaggtcatccacattcttcattctacaagaacgccctagcctcagccagccaggaacttttgtgctgatgctccactcagccccacaactctgccctgcctaggtggaggaagaaggtgacaggaaggctggggccaccttccccaggctacagctgctaaccaccctgttctcccaccacagcctgactttgacgacaggagagtgggccgtcccaggtctatgctgcgctcatacagacagatgtccatcatctctctggcttccatgaattctgactgcagcacccccagcaagcctacctcagagaggtcagtccctgcaccccaaggagccccccacacccctgcctccctggctctatcccccctccttctctctcttctccggcaacatcccttctacctttcccttcctcctttcagtttaaaagccttttcccatctgcagtctcacaactaccccaggaggctcatggttagtaccatttttaggggattatcagaggctcagagaggcaaggcagctttcctgaggacccagcaggagtcacctgcagcccccagacttctagtccagtgatctctgtcagccaggcagagctcctcaccaagcctgcatccttctggaatattgtcacctctcatagggatctgttccctttcaaggaagctcctcccaaccacgatgggatgtctccattgcagagctcttcctcctgcaccacctacccacccctctgtcgggggtcttccctcccttgccccttccaccttcctggagccctctggccatcattgttggaccctccagaaacttccctgcgggcctcagaggttactcttgcccagagggaaaaggatggaaacgtcttctgtttcacagttctagggggcatcattcacaattctagggggcaccattcaccctgcccaactcatctgttctaatcatagatacatgagcaacccagcacttaccatatgccaagaatatgccaagggttcctcagacatcatctcatggccactctgcaaggtctctgcgaagacctccatttactgaaaaggaaatgatggcttgaagaggttgagtgatttacccaaagttattcattcagctaagaactggccgtgcctggatttgaatccacattcatgctttcaaccagtcttctctcctcaccaccagtttcttttctatggctcacttctttcaatttcattttaccacgaataaaataaagtgaactttactcatcacatttaactgtttgtgcattgagcaagttgctccccaaatcctctgccagatttgctgatctactccagaccctgtagtgacagctcaggcagcccaaaggtccccttcagcttcctgggtccttgcaaggcagttctactgaagctctaactgcagtttctattgctgcccctctggcctttcagctttgacctggaattagcatcacccaagacgccgagagtggagcaggaggaaccgatctccccggggagcaccctgcctgaggtcaagctgcggaggtccaagaagaggacaaagagaagcagcgtagtttttgcggatgagaaagcagctgcagagtcggacctgaagcgggtgagtggctgaggcagattgcctctccagcgctgttagcacatttccactacatgctgggcacaaaacccagggcttccagatatgggcttcctgaagcctgccactgcggtgctatgggtattgcagaggcggcacctgaggagctgagaggtgaagtgcttactcgtgcccaggcagctggggtggctgggacatgacagagctgggagttgagccctgacctttgcacttcagagcctgtgtgtatcctttccaccatcacacagggcttttccaggctggggagaatccacctgttctcccaccaaaagggagagcagcccacttggtactgagctaggtgtttctatagcccccagccccaggcctattctaaccactgatgtctcagacccctgcaagcccctcctgtgtgccaggagtccaggtggggatacagggatgaaatctcactgtcctggctttgagagtgttggtcttgtaaactaacgattatttaaaaatgagacttggtttcagacagccctggattcaatcttagtttccccctggaaaagaggtttgttggaagtgttctgggaacctgggagtgggagatggattaactgccctggcaagggaggggtgccaaatgaaagagcaaggggccaaccaagatgccttagtgaagaaagggccctccagaaacttcccagtgggcctcgcaggctactcttgcgtggatggataagaatggaaatgtcttctgtgtttgtcgattctaggggacaccatttacatgatagtctaaatgaatgtccgccacccccgcctgtagttgtgtagtgtgcaacctgtgcaaccatatgtggcaggctggcatggaatggtataatacagaataaatgaacttggagccagcttcatagaaaccatgccacgccctcctcactgatctttcagagacccagatctgcctcatgctaagcctctgtctttgtgtgtgtgtgtgtgtgtctggtgtattcctccagctttccaggaagcatgagttcatgagtgacaccaacctctcggagcatgcggccatccccctcaaggcgtctgtcctctctcaaatgagctttgccagccagtccatgcctaccatcccaggtatgccccctgctgccaccagcatgagggagtagagatagtgcaggccaccagccttgtgggtggaggatggatgggaactgtgtctacacaacaaagtgggccaggcatcctggagtgagaggctctgctcatagccacccaccctctaatctctccccacacccaccacttcctgggggtgacaccatcccagcaagctccagcagggacaggggagaggcctgctgtcccttgggccctcaggattcactgagcatccatttgtcacactaggtggccccttgttctcagttagccaggcctccccaggggccagaagtttgcccttggtatgtccctaagacctgtggcttctttgtggacctggaagactctttctggctttacagaaatggccaccacatcttatagctgcaaagtgtttggtgcatagatgctacctatctgccaccgtcgtcactcactcactgtccagtgaggaggttagagcacagccgatggtcctaactcacagaagggaatctgaggccctaacaggggacatggcatgcctgagagcactccatctggtaggcagaagtccttgacgtctgctgctatgtgcctggctctgtgtgctaagggccaggtcagaagggaacaagacaggaccagtgctgccctgtggaactcagcaggccgatcatggtgaagacgcttgctgtttcctgaacattgagggtgccaggccctgcgccaactgctactccttctttatttcatttactccactgcgcatacccaggaagtagttcatgttatccaccccattgtatggatgaggaaactggggcactgagaacatcactctcttgcctatcaccagccagcaaatggcagaggctgagttcagacccaggccctcttccctggaacaggcacctacccactgccccgccaccacccccaggatagcctgaacacagctgcaacatttggcccaagccatttcactggtatctgctcagcaggtctcaccacaccctggcggtctgggctctttctcccatttggccaatgtcaaaaccagcagtcagagagtaactaatttttcatgtctctgtgacgccaagctggggctgtaaccactaggtcatctggcccctccaccaggtgacacgtgggtttgaggctctcttcccgctgtctcctgcaatggggagagaaatccagggtgttggtgttgggagctggaggaagagtaagctcacactgtcccctgccttggagcagaaggttctgtttcctggggatgtcagggctttggggcaaggttttgaccaggagccaggaggctgaacccttgtctgtagggtgggcaatcttcactgcaagaggacagcttcaatgtcccctggcacggcaggaaataggcatcctgcctcctgcttggcacatacaatgtgtgatccctggatgctggctctgtcccccagccctccccctgtctacctcccccaaggcactgcccctcctctacccacccattcacaccccagctctgctctccttccagccctggcgctctcagtggcaggcatccctgggttggatgaggccaacacatctccccgcctcagccagaccttcctccaactctcagatggtgacaagaagacactcacacggaagaaggtcaatcagttcttcaagacaatggtgaggacattgagggtggaaggaaaggaaggcattgggaggagaaagggaagagagcaatgcagagagaagaaaatggggggttgtgtgtgcatatgtggtcattcctagggaggcatagtcaggaggccctgagttctgggacactgtgcagcaatgcccagagggcagttctcctctggggcctcaggcagctcctctgaccaggattgaccccagctagggatgtgcaggacccagggacctcagaagcagtaggtggcctaccctcgcctaaactgccccttagtgctccagcccttttttattcaacctatatcacaaaatcctacaaattgaacattagtttccaagcgctgattctgcaagtcccatctcctattgttacttgttggcctttgctcaagatcaagaaggtaccataacacatctgatcctcaaggtaatatgaaatcaggactctgctactacaaatatctcaagtttaccatgagcacacgatgagtcaggcaccatgctaagcacttcccaagcatggtgccatttgagctcccactcttaggattttatatgggaggctcacagggtttggtaagtgaggtgcccaagtccacatggctagtgagcctgggctcactctactgtctaccactgcctttctggccaaagccaagggcatagcagctcacattcactgggctttgggcaggggtcagtgttgaggcccttgtgattaggactgggaagctccattttggtgcttaatctgataatcgcatcttggttttgtgcttgtttattctctcaaaagctggccagcaaatcggctgaagaaggcaaacagatcccagactcgctgtccacggacctgtgagctgctgctgactagggctgcatgggagagccagggaggggagtttctggaagaggaaagccatgcgtggaacatcgaagcctcagagagtgggagactgtccccatcagttgtccttacttagaggagacagagaggccaatcaggtcccagagcttgaatgctaacaagcccagcatcccctggggctgtgatcatggtggatgaggaagcctcaacgtagattcctgaactcaaggtaccagcaagaatgccttctcccagtgtgctctccccaacatcctaggcacagctttcataacccagtttcttaggtgtaagaaactgtttttatctcatttattaagtctcagaacttaacagaaaaggaagccttttaaatattctttttaattttattttagattaacagttttgtactttacatttttttatacaaccaaccagtttcttttctagccaatcatctctgaagagttgctgtttcttactgacaataaaaaatgttctcttggttcgaataagccttgttgcctgattctgttggctgactctcctgggcccaggactgggcaggaagctccctggaaggaaggcaggcccaggggctgcagtgatgtgaaggagcctggtgatgcccttgcccaatgccaaatttccccacctcatctatgagaagattcttcaagaatctccatgactcttgttccttaggtgccaaaccctgggctaccagcatgttaaaaaagttgccctggtcttcctcacgaatctgaatagtggagtgtcatacctcctttcttcacctttagaaagagatggcaagaccacccaagccaggtcactctagtaaagaccaaacataatgccaaagagttaggaaaagaggggtctgaggtccagtggacttatggtccagctcttggatcttgtcaccggctcccaagtggtggcttttcttggaggaattctcaggtttttcagatgaggcccaaaggaggtgagtagctttgtcaggcagcagcaagagaggatgggagcaaagtcccacgtctggatcctacagagagcagggagctgtgcaggggaggggtccagaaggaggcggaggactgcatttgagaaggaaattaatactgggtaagtgcatgacaacacaggtttcagaactagagccatctggaaaccttggggtggatgctcatttacaggctgggtccctggggtatagtaagagatgagaaagaatgatgatggtagctcaaatttattgagccctgactgtctctgggacagtgttatagacatgataagaatgaacttcctaagtctagacagcagccctaggaggtagatacgattgctacccagatgaagaaatggaggcacagaagcatgaagtgacccaagatcacacgcttagtaatggaatggctgggattcaaacccagacagctgggtgggaagcctgactcttaggcaccaccctacattgtctctgggacaccttagtgcacagaatatcctgagtcttggtagcctttatccaccccagcctgtccctggtggcctctatgtccctgctgcaagccccatttgaagacgtgttgcctagttcagcttctagtttcctcaacagtctaaaaagtcctgttgcgatgattgttggggtttgggctacaacaaacacctttgggttccctaaggtgagtaagcagcacctggaggattggactctattacgagcttggcttctcatgcctgctttttctcttattatgaactgataaaatcctactgtttagctttgacatgtaagcccttccaaataccagtgggcagtgggggccagggaggagggggcaaatctcaacaaggaaaagaaaatggttctcccttttcccacaactacagaaaagcagatatgatcctgtgccttgaaactgcagatgttaccctcactcgggagtactgaaaaacacccatactcagaggttgttgctatgtcgtcccgagaaagtaagctttaacccctaaaaattctgtaactgattgatcttctcgcttaacaccgtgtgaccctggtaataatatttctgagttctattttctgaagattatcagtatctatgagttttcttattaagtctgaaggggaccattggcacttccctgttttcccatataaatggagcaagacgttaaacccataaacagggtttgaaagtcaaatgtcatttcagttaagaaatgaggttgacagcccacttaatcctttgccagaaaaattttagatgctgccatcacatggcaggaaaaacaatgccagtagtaataacaataacaagcaataataataatacagctgccacttaccaggcacttactctatatgtcatttccttaaatcctcacaccaatcctatgagctagacactacggtcccaatcacattgatgtgaaactcaattccaaggttgaggagtttgtgatgtggccttgtcacctgactagtaagggacacagccatctctatccacaccaagcctcgtgatcttaatccacacattcactttatacctgggacctcagctcaatgtcagactctatttcaccgtccatgattgtttgcaagtcttctcctacaatgccaatggtggcacctgggaaaaatgaaggtggggttaggcatttggcatagccctcctggtaccaccgatgttcccttattgtatacaagttctgtccaaaacaagctagtcatctcaaggaagggtgtatgtctcagaatttccagaaggaggtagcattggatgggattggaggaaggatctctttatatgtcttcccttcttgatgctgttttctgggacccttagggaccacttcatccagtgctctcattttacacagttaagtgatctctccaatggctgtgatcagcaggacccaatctggaatccaggtcttcttccaggtaatctcccatcagtggaaatctctcaccttctctttaagcacccagtgacgcttgttctctgtctccaagacagggttgatatctgcgattcatactttggtttgatctagagcactacattcccttcctttccttaagggaggggtatttttagcctttattcctaagcatggagtagaagtcttccttctttcttctaggctttcaggcttatgtcagcaagtagaagagaaattgagggaaacaaatggccttcccagcatccaaaatcaggctgggctctgctttccagacatgctaacctgtaacacatctgtatgcctctcctggctgaaacctgggtgtttctgcctccctgccatagcttcagttccctaggaaacagatcctcaggcaatgattgaatgccatgctcttttggggctgtgcaatcttagggtgaaggaaagagggaaaagggattggaagcaatgaaagttgaggtattaactctacttgtctctggttcacactaagccacaaagagactcaacttgtcaggcagcattgagcagggtatctttgggcagggtataatagagaaatcaaaccccagaagagtctgtaaaaaggagaaagtccgggcgtggtggctcacgcctgtaatcccagcacttacggaggccaaggtgggtgggtcatgaggtcaagagatcaagaccatcctggccaacatggtgaaaccctgtctctactaaaaatacaaaaattagccaggtgtggtggcatgcacctgtagtcccagctactcaggaggctgaggcaggagaatcacttgaacctgggaggtggagtttgcagtgagccgagattgtgccactgcactccagcctggcaacagagtgagactctgtcaaaaaaaaaaaaggaagaaaagggaatgtatttgcccagcttgcccctacctcagtctcctgtttctagtagtaagttccccctgttgggtatggtaaaacccttcatggttttacctgtggattgcatcatttagccctttcagtagctgcttgggaagctagatcccacgccccacaaagtggcattccatccaagggcagaatttgtgtaagaaaccagcaactcagggaataagccagtagtctgggctctgttgcagcaagaaaagggaagagcaaggccttatggacaagcaactggtggactccaggtgggaggaccatgtgaacctaagttggctgcagtggctactgaggtagagcagacagctggcgtcccagaaaaccatggcctctgaaggagccgaaaaggcatatgagattgtctgggacattcagaccctcacatgccccttctgttatctcctgctcctattatagcttgtgaatcttctctctctctctctctctctgtgtgtgtgagtgtgtgtataagatgtactttctcctttcctacaaaaagatgaacaaatccatatgctttctcctttcctaggaggggatgtccaagtccatgtgctttttcctttccacatgtccaagtccacatgttttctttcccataagagatgtccaaattcatgtgctttctcctttcccaagaagggatgtcccagtccaagcagtcacagagtccacttcaaggcggcatttagttatgatctcccacacaacctacagcaagaagatttgtgaaagaagccacgatagctactgcagctggaccaagactataacagatactcattatctccttcctccaccacccagttaagtgtctctgacccacaggtcacacttcatctggactgggttgcctgcctgctgggctgctcagacctcttattcccaaagggtctgagtctaattgctccacccttcttggtttgtggttgttgtaattacctagtgatcattaccagtgggcatgagtgtactaagaaagggcccagtgatccccttggttccaggcacgctcctctctgcgcctattgaatcaacatccgaggtcctcatgtaatcagggtcagttgctgatccatgagcatgataagccaaagtggccaagtggtcgtcacacctccagttcaatgggggcatcactctggccctaccttgtgaccatattatgggttgatttgtgtccttctaaaattcacatgttgaaataataacctccaatacctcaagatgtgaccttatttgaagatagggtctttaaacaggtagtaaagttaaaacaaggtcattagggtgggtattaattcaacatgactggtgtccttataaaaagaggaaatttagagaaagatgggcacacagggagaatgccatgtgaagataaaggcacagattggagggatgcatctgcaagccaaggaacaccagattgccagcaaaccaccaaaagctaggggcaaggcataaacagattctctctctcagtatctaggaaaaaaaaaacagtcctgccaacaccttgatttcaggcttctgatctctagaactgtgagacaataaacttttgttgtttaagccacccagtctgtggtatttgttgcagtggccctagcaaacaaatacagactgggacctcacatcttacaaagcccaagacggcaaggacaggaggcatcaatcccacgggtaggtcactggtgtgatagtgagaagggcttttgtactctcacaccaggtccccagctttaggagactttgaagacatagtattatacaccgcccatagtattatacatcacccactgtccactgaatttactacagactggaggacggctccctgggaggtagtgtcccccactggaaccttggctgagcctctaaaaggctgtgctctgttccatcaggttggctgcttctgaatgatgggcttcatggtaaagctgatgaatcccacggccttgaacccattatgttaagttccttgctgagaatgggtcccttgttccagctgaaggtttgtgggatcccaactcaatgaataaggtttttctgtaagcccttagatgataatgcagacagaaacatcatgggccttcgaaggcaaccccatatctagaggatgttttgatcatgataagcatgaattgttgttctttgcagggtggaaaggtctcagtgtaagtgacccatgtttccctaagaaatggtgcatgtaatagactcagtgtcagtcgctgctgctagcaggtggacactttgcagtagaaatagctataccacacttggtgagaggaattccatattgttgaacctaggtagagcctccatctctgccaccatgaccacttgatcacaggcccattgcacatgcaatggatggcagaggagcaaagctgagctataggactgatcatccaacttccttgatggttgaaagactgatctgtggtctttctggtgagcagtaaaacacagatctgccaattttgagtctgctcccattggatcatgaacatacttcttgcccagacccccagtaatgaatcttccagtattattcttttcagtcctctgaccaatcaacaaagccattctttattgcccaggagaataaatgtctatctcagttcatgttcccctctttttagggaagacagccaaatgtactgctcatagccctaccactgggctgcaacacagctgcagtccatttccagctagcattaacatagtatgccttctccataagttggccttgtagaatccctccataagtccaaaagtatgggttgaaggacaggcatgaattaagcaaaagtaggtaccatggaattctgggtcatcagtttttatcatttactcttgccttcaagacttgcttgagcctgatgccaaagataccactttcataatatgatggatttctgccacgctctgccttatgatgtggatgcaaccatgatgcccatgatggacatctcaggttgcatggtcccttggtgtcccatagtgaggagctcaacttctgaggagacccagtagcattctgagagctatttttcagacagagagtcaaggagaacataagtttgatttagattctgagaggtatgtgctgtaatcatcctatagggtcttgttagcatctccattcagcatccacatctgccgtgaatatctccacggtaatcagatatggcctcagaggcagagcagctagaaccacagcctagacctgctgcagagcatttgtctctaggttcactcaaactggcatactccagagtcacctgataacaaattggaagcagtagtccacattttctttgtccaagatccaaaaagactcatcggcttctatgtctcttttttagtaaaagaaaatgtaagatgcaggctgggtgtggtggctcatgcctgtaatcccagcactttgggaggctgaggcaggtgaatcacttgaggtcagtagttcgagatcagcctgatcaatatggtgaaatcccatctctactaaaaaatacaaaaattagctaggtgtggtggtgcacaactgtagtcccagctactcaggaagctgagttgggaggatcacttgaacccaagaggcggaggttgtggtgagctgagatcatgccactgcactccagcctgggcaacagagcgagactccatctcaaaaaaaaaaaaaaaaaaaagtaagatgcaacagcttgttatttatattaaaggtgatgtcccagcatgccctaacaactggagcccaaaaattggtaacagtcacattggtgacatatatcaggcccctaaatcactcaggtttatcaacccacccttgtagcatgtatgtgtcttggtggggaatctagggtgcctgacactccctgatcaccaagccaatgaacatgatgttatgcatgtagaggaacagtgtgatgtttctggaaataccaatataagcacggtctctatggactatcttaggacagagaaaaggagagttgacactgcaccgagtctacccagtgcagataccctgttgtcctgccataacaaagcaacctgcttttcatgttcctttcatatgaatgctaagaagaaaacattcatgaaacgaataaccacatcccaaggagcagaggcggtactgacccgttcctgtaaagacacgaaagtccacctagcatctagtgatattgatggtagtccactatcatctgtcaagattcgattcatatttagagacagacaggtgaattgaatgggaatattataggggccactggccctatgttcttcaagtcttcaacagctgtgtttatctctgcaattcttgtgtctgatcttgacaaaacaggcttccactcagaccttcctactgtaatgggtctaactgcccaggtcaacaaacagatgcataagtgagtgtgttctacattcaggaatcaggccaagacccctatcacttgttctccaatggtccacactccaacctgaggaccatcatggagttttacatcccctgatattggtgttaattcagatctcatatctacttggctttgagggatccagatatttccttttccctggttcacagtcaccctggaaatagtcataagtccctttgggaaaatttagagaactatttcctgaagatacttgtgagtacactgcagggttttgtcttaaagaatcagcctccccttcaatcaatgggccttgatgtagatctgaaagctgagtgaggggtcacaatttcccataaccatggctgattttctgattatgtaaaccaagcaacaatctacatagcttctcatctatttggcctctgggaataccatcacctacagtggtcagtgtgggttacagatcctacaggtccctgtgggttaaggcacgctgattgtctctctcaccctgttgctcattgtgataattacctctacttgggacctgaaagtcagatgtaggtacctgcctttcctaaactaggagtccgtcagtccatcatccccactgacatgagggagcccagttccacgctgacatcacctgccattaacattgacctagagaggatggccactcccatgcttggtgtctctatttgtttcctgtggctgctatagcaaataataaacaaaacccaaacaaacaaaaagcttcaggagttttaaacaacagaaatgtgtcccttcacagttccagaggctggaagtctgaaatccaggtgtcagcagggccatactccctctgaaggcttcagggaagaatcttcccttgcctcctcctggcttctggcggtcagcgatgcctggtgttacttggcttgcagcggcatcactccagtttctgcatccaacttcacatggccaccttctctgcgtgtgtgcctgtgtctcgtgtctctctgtttccaattctccctgttcctataaggacaccagtcattggatttagagcaccctaattcaggatagcctcattttaacttgattacctctgcaaagaccctatttccaagtaagatcacattcccaggttacccagggttaggacttcaacatatattcttgggtacacaattcaacccataatacaggtaccctttactttttgtcctaaatgaaaaaaaaatatatgtcctttaggctctcccagggaacataatctcaagtcaggcataataaatttcttctaaaacatccacttccctgagctgcctgatcccttctgaactaacagtgttgaataaaccaagttctggtgtgtctactccattcaatataggccaccctcagtcccagcttcaaggaactatcttggaaaactatcaaaaccagcactgggcgtctgccctaacattgaatcccaagccaggaacatgcgccccatgctaatgaattctcctctatctgatcttatttccaaaaacttcctaagccttggcaccctcagatccactcccatgcatgttcccagtgccaccagccagatcctgcaattccatgtaagctgtatcttcccaaggcaggagacacagctcccctcccaggctgtgctcccctctcagacccgattctggttgctgggtggaggcagtaaggggcggtggagtcagttctccagaggaacaagcatccactggcagagcatgtgtttcaagcaagagctccaagaaaggggaggccgttcccttctgataagagagaagggcctgcttcagccaggcaggatgtttgggggattcaaaatgttcaggcttacagggctgaaggtttctacatcagatctttggctgcagtcttcctgtgagggcgctgactttactggaggaggctattgaagctttgcattcctgtctttgcaagtctttcacccttttaaccagactctaacccaatttcagcagagtctgctcagcaactgcatgagatgaggtctctaaaatatttcaaaccagctgtgacgggcaccatagtaacccctcagtgatggctgtattctaatccctggagcctgtgaatatgttaggttacctgacaaaggagaattaaggttggagatggaattaaggtttgctgatcagctgagtttaagatcatggagattatgcaggattatccagattggtccaacgtaatgacaggagtctttaaaagcagaaagaggaggcagcagaggagagtcagaggatgccatgtgagaggaagtcactgcctgttgctggctttgaagacggaggaagggggtcatgagcccagggatgcaggaagcctctagatgctgggaaaagcaaggaaacaga

SEQ ID NO: 1409 - DNA, 6393 bp, Homo sapiens
cttccccacgggaggacgcgaggccccggcccagccatggccccctggcgcaaagctgacaaggagcggcacggcgtggccatatacaacttccaaggcagcggagccccccagctctccctgcagatcggcgatgtggtgcgaatacaggagacgtgtggagactggtataggggatacctcataaagcacaaaatgttacagggcatttttcctaagtcatttatccacatcaaggaagtgacagttgagaaaagaagaaatactgagaacatcattcctgcagaaattcctctggcacaagaagtgacaacgacactttgggaatggggaagcatctggaaacaactctatgtggccagcaaaaaggagcgttttctccaggtgcagtccatgatgtacgatctgatggagtggaggtcccagcttctctcaggaaccttacccaaggatgagctgaaggaactgaagcagaaagtcacgtccaaaattgactatggcaacaaaatccttgagcttgatttgattgtcagagatgaagacggaaatatcttggaccctgataataccagtgtcatcagcttgttccatgcacatgaggaagcaactgataaaatcacagagcgtatcaaagaagaaatgtcaaaagaccagccagattatgcaatgtattcccggatctcctcatcccccacccatagcctctatgtgtttgtgagaaactttgtgtgcagaattggggaagatgctgagctcttcatgtctctctacgaccccaacaagcaaacggtcataagtgagaactacctagtgcgatggggcagccggggcttccctaaggagattgagatgctcaacaatctgaaggtggtcttcacggatcttggaaacaaagacctcaacagggataaaatttacttgatttgtcaaatagtccgggtcggcaagatggatcttaaggatactggtgcaaagaagtgcacgcagggactgaggaggccctttggggtggcagttatggatataacagacatcatcaaggggaaagcagagagtgatgaagaaaagcagcacttcattccttttcacccggttacagctgagaatgacttcctacacagcctgctgggcaaagtcatagcctccaagggggacagtggagggcaaggcctctgggtgaccatgaagatgctggtgggtgacatcattcagattcgcaaggactatccacacctggtggacaggaccaccgtggtggccaggaagctgggattcccagagatcatcatgccaggggatgtcaggaacgacatctacattactctcttacaaggtgactttgacaagtacaacaagaccacacagaggaatgtggaagtcatcatgtgtgtgtgcgcggaggatggcaagacgctgcctaatgcaatttgcgtgggagcaggggacaagcccatgaatgagtatcgctccgttgtgtactatcaagtcaaacagccacgctggatggaaacagtcaaggtggctgtccctattgaagacatgcagaggatccatctgcgattcatgtttcgacatcggtcatctctggaatctaaagataaaggagaaaagaactttgccatgtcctatgtgaagctgatgaaagaagatgggactactctacacgatggattccatgacttagttgtcctcaagggggacagcaagaagatggaggatgccagcgcatacctgacccttccttcttatcgacaccatgtggaaaacaagggggccacgctgagcaggagctccagcagtgttggggggctttctgtcagctcccgggatgtgttctccatttccaccctggtgtgctccacaaagctcactcagaatgtgggcttgctgggtttgctgaagtggcgtatgaagcctcaactgctacaggagaatttagaaaagttgaagattgtggatggagaggaagtggtgaagtttctccaggatactctggatgccctcttcaacatcatgatggagcattctcaaagtgatgaatatgacatcctcgtctttgatgccttgatttacataataggactcattgcagaccggaaatttcagcatttcaacaccgttctggaggcttacatccaacagcatttcagtgcgaccttggcttacaagaaattgatgacagtgctgaagacttacttggatacctccagcagaggggagcaatgtgagccaatcctaagaacgctgaaggctttggaatatgtgttcaagttcattgttcggtcgaggacattattttcacagctttatgaaggcaaagaacagatggagtttgaagaatccatgagacggctctttgaatccatcaacaatctgatgaaaagtcaatacaaaactaccatccttttgcaggtggcggctttgaaatacatcccatctgtcctgcatgatgtagaaatggtctttgatgcgaagttactcagccaactcctgtatgagttctacacctgcatccctcctgtgaaactccagaagcagaaagtacagtctatgaatgagatagtccagagcaacctctttaaaaagcaagaatgccgggacattctgcttcctgtcatcaccaaagagctgaaggagctgctggagcagaaggatgacatgcaacaccaggtcctggagaggaagtactgcgttgaattgctcaacagcatcttggaagtccttagctaccaggatgcggccttcacctaccaccatatccaggagatcatggtccagctgctgcggacagtgaaccggacagtcatcaccatgggccgggatcacattctgattagtcactttgtggcatgtatgacagccatcttaaaccagatgggtgaccagcactactccttctacattgagaccttccagaccagctctgaacttgtggacttcttgatggagaccttcatcatgttcaaggacctcattggaaagaacgtgtaccctggagactggatggccatgagcatggttcaaaacagggtcttcctgagagctatcaacaagtttgcagaaaccatgaaccagaagttcctagaacacacgaactttgagttccagctgtggaacaactattttcatctggcagtggcttttatcacccaggattctctgcagctggagcagttctcacacgccaaatacaacaaaatcctgaataagtatggggacatgagacggctaattggcttctccatccgtgatatgtggtacaagcttggtcagaacaaaatctgcttcatcccaggcatggtaggacctatattagagatgacacttatccctgaggctgagctccggaaagccaccataccaatcttcttcgacatgatgctgtgtgaatatcaaagaagtggggatttcaaaaagtttgaaaacgaaatcatcctgaagctggaccacgaggtagaagggggccgaggcgacgagcagtacatgcagctgctggagtcaatcctgatggaatgtgctgcagagcacccaaccattgccaagtcggtggagaacttcgtgaacctggtcaaaggcctcctggagaagctgctggattaccggggtgtgatgacagatgagagcaaagacaaccgcatgagctgcactgtgaacctgctgaatttctacaaagataacaacagggaggagatgtacataaggtacctgtacaaactccgcgatcttcacctggactgtgacaattacacagaggctgcctacacgctccttctccacacctggcttctcaagtggtcggatgagcagtgtgcatcacaggtcatgcagacaggccagcagcacccccagacacaccggcagctgaaggagacgctctacgagaccatcataggctactttgacaaaggaaagatgtgggaagaggccataagtctgtgcaaggagctggcggaacagtacgagatggagatctttgactatgagctgctcagccagaacctgatccagcaggcaaaattctatgaaagcatcatgaaaatcctcaggcccaaaccagactactttgctgttggatactacggccagggattcccctccttcctgcggaacaaagtgttcatctaccgcgggaaggaatatgagcgaagagaagatttccagatgcagctgatgacccagttccccaatgcagagaagatgaacaccacctctgccccgggagatgatgtgaagaatgccccaggccagttaaaaatgtggccccataaaggctggcctggaaggtctcagcaaggaccagctatacttaaaactgtccccgcagccaacagatataagtccttaactacagggattccagatatccagtgcttcactgtccagcctgtcttggatgaacatcccaggttcaagaataagccagtgcctgaccagattataaacttctacaaatccaactacgtgcaaaggttccactactcccggcccgtgcgcagggggaccgtagacccagagaatgagtttgcttccatgtggattgagagaacctccttcgtgactgcatacaagctgccggggatcctgcgctggtttgaggtggtgcacatgtcgcagaccacaattagtcctctggagaatgccatagaaaccatgtccacggccaatgagaagatcctgatgatgataaaccagtaccagagtgatgagaccctccccatcaacccactctccatgctcctgaacgggattgtggaccctgctgtcatgggaggcttcgccaagtatgagaaggccttcttcactgaagagtatgtcagggaccaccctgaggaccaggacaagctgacccacctcaaggacctgattgcatggcagatccccttcttgggagctgggattaagatccatgagaaaagggtgtcagataacttgcgacccttccatgaccggatggaggaatgtttcaagaacctgaaaatgaaggtggagaaggagtacggtgtccgagagatgcctgactttgacgacaggagagtgggccgtcccaggtctatgctgcgctcatacagacagatgtccatcatctctctggcttccatgaattctgactgcagcacccccagcaagcctacctcagagagctttgacctggaattagcatcacccaagacgccgagagtggagcaggaggaaccgatctccccggggagcaccctgcctgaggtcaagctgcggaggtccaagaagaggacaaagagaagcagcgtagtttttgcggatgagaaagcagctgcagagtcggacctgaagcggctttccaggaagcatgagttcatgagtgacaccaacctctcggagcatgcggccatccccctcaaggcgtctgtcctctctcaaatgagctttgccagccagtccatgcctaccatcccagccctggcgctctcagtggcaggcatccctgggttggatgaggccaacacatctccccgcctcagccagaccttcctccaactctcagatggtgacaagaagacactcacacggaagaaggtcaatcagttcttcaagacaatgctggccagcaaatcggctgaagaaggcaaacagatcccagactcgctgtccacggacctgtgagctgctgctgactagggctgcatgggagagccagggaggggagtttctggaagaggaaagccatgcgtggaacatcgaagcctcagagagtgggagactgtccccatcagttgtccttacttagaggagacagagaggccaatcaggtcccagagcttgaatgctaacaagcccagcatcccctggggctgtgatcatggtggatgaggaagcctcaacgtagattcctgaactcaaggtaccagcaagaatgccttctcccagtgtgctctccccaacatcctaggcacagctttcataacccagtttcttaggtgtaagaaactgtttttatctcatttattaagtctcagaacttaacagaaaaggaagccttttaaatattctttttaattttattttagattaacagttttgtactttacatttttttatacaaccaaccagtttcttttctagccaatcatctctgaagagttgctgtttcttactgacaataaaaaatgttctcttggttcgaataagccttgttgcctgattctgttggctgactctcctgggcccaggactgggcaggaagctccctggaaggaaggcaggcccaggggctgcagtgatgtgaaggagcctggtgatgcccttgcccaatgccaaatttccccacctcatctatgagaagattcttcaagaatctccatgactcttgttccttaggtgccaaaccctgggctaccagcatgttaaaaaagttgc

SEQ ID NO: 1410 - protein, 1851 aa, Homo sapiens
MAPWRKADKERHGVAIYNFQGSGAPQLSLQIGDVVRIQETCGDWYRGYLIKHKMLQGIFPKSFIHIKEVTVEKRRNTENIIPAEIPLAQEVTTTLWEWGSIWKQLYVASKKERFLQVQSMMYDLMEWRSQLLSGTLPKDELKELKQKVTSKIDYGNKILDLIVRDEDGNILDPDNTSVISLFHAHEEATDKITERIKEEMSKDQPDYAMYSRISSSPTHSLYVFVRNFVCRIGEDAELFMSLYDPNKQTVISENYLVRWGSRGFPKEIEMLNNLKVVFTDLGNKDLNRDKIYLICQIVRVGKMDLKDTGAKKCTQGLRRPFGVAVMDITDIIKGKAESDEEKQHFIPFHPVTAENDFLHSLLGKVIASKGDSGGQGLWVTMKMLVGDIIQIRKDYPHLVDRTTVVARKLGFPEIIMPGDVRNDIYITLLQGDFDKYNKTTQRNVEVIMCVCAEDGKTLPNAICVGAGDKPMNEYRSVVYYQVKQPRWMVKVAVPIEDMQRIHLRFMFRHRSSLESKDKGEKNFAMSYVKLMKEDGTTLHDGFHDLVVLKGDSKKMEDASAYLTLPSYRHHVENKGATLSRSSSSVGGLSVSSRDVFSISTLVCSTKLTQNVGLLGLLKWRMKPQLLQENLEKLKIVDGEEVVKFLQDTLDALFNIMMEHSQSDEYDILVFDALIYIIGLIADRKFQHFNTVLEAYIQQHFSATLAYKKLMTVLKTYLDTSSRGEQCEPILRTLKALEYVFKFIVRSRTLFSQLYEGKEQMEFEESMRRLFESINNLMKSQYKTTILLQVAALKYIPSVLHDVEMVFDAKLLSQLLYEFYTCIPPVKLQKQKVQSMNEIVQSNLFKKQECRDILLPVITKELKELLEQKDDMQHQVLERKYCVELLNSIVLSYQDAAFTYHHIQEIMVQLLRTVNRTVITMGRDHILISHFVACMTAILNQMGDQHYSFYIETFQTSSELVDFLMFIMFKDLIGKNVYPGDWMAMSMVQNRVFLRAINKFAETMNQKFLEHTNFEFQLWNNYFHLAVAFITQDSLQLEQFSHAKYNKILNKYGDMRRLIGFSIRDMWYKLGQNKICFIPGMVGPIMTLIPEAELRKATIPIFFDMMLCEYQRSGDFKKFENEIILKLDHEVEGGRGDEQYMQLLESILMECAAEHPTIAKSVENFVNLVKGLLEKLLDYRGVMTDESKDNRMSCTVNLLNFYKDNNREEMYIRYLYKLRDLHLDCDNYTEAAYTLLLHTWLLKWSDEQCASQVMQTGQQHPQTQLKETLYETIIGYFDKGKMWEEAISLCKELAEQYEMEIFDYELLSQNLIQQAKFYESIMKILRPKPDYFAVGYYGQGFPSFLRNKVFIYRGKEYERREDFQMQLMTQFPNAEKMNTTSAPGDDVKNAPGQLKMWPHKGWPGRSQQGPAILKTVPAANRYKSLTTGIPDIQCFTVQPVLDEHPRFKNKPVPDQIINFYKSNYVQRFHYSRPVRRGTVDPENEFASMWIERTSFVTAYKLPGILRWFEVVHMSQTTISPLENAIETMSTANEKILMMINQYQSDETLPINPLSMLLNGIVDPAVMGGFAKYEKAFFTEEYVRDHPEDQDKLTHLKDLIAWQIPFLGAGIKIHEKRVSDNLRPFHDRMEECFKNLKMKVEKEYGVREMPDFDDRRVGRPRSMLRSYRQMSIISLASMNSDCSTPSKPTSESFDLELDKTPRVEQEEPISPGSTLPEVKLRRSKKRTKRSSVVFADEKAAAESDLKRLSRKHEFMSDTNLSEHAAIPLKASVLSQMSFASQSMPTIPALSVAGIPGLDEANTSPRLSQTFLQLSDGDKKTLTRKKVNQFFKTMLASKSAEEGKQIPDSLSTDL

SEQ ID NO: 1411 - DNA, 60537 bp, Mus musculus
ggagttcctttgtttcaagtgactctaggtttttgttgacaattgaactatgatattttcaagattaaacatatgtacttaaaatttttttatttgtgtgcatattttgtgtgtgtatgcctcatgtgtgcaggagcccatggagaccaaaagagagttgctgaatcccttagaagtatagctgcatgtgcttataagctagcaaaggtgcgtgtatgggaaccgaactcaggttgtctggaagagcagcaagtgctcttaaccaccgagccaactctccagccctcccctgctcccaaataaacaaagactgaaacggcataaataaatatccatgtttaatggactacaaagtattcctaaaagataattatccgtctgtgtgtgaggtttttttttttaagatttttattatttatttattttatgtatgtgagaacatggtagctgtagaggtgattgtgagccttcatgtggttatcagggttgaatttttagaaccactgctcgctctggtcagtcccactcgctcagtccttgctctggcccaaagattcatttattattattagctgacttctgatataccagaagaggacatcagatctcatcatgggtggttgtgagccaccatgtggttgctgggatttgaactcaggaccttcggaagagcagtcagtgctcttagccatctcgccagcgtgtgtgtgtgtgtgtgtgtgtgtgtgtgtgtgtgtgtgtgtgtgtgttttactggctgactttgaacttgctataaagctgggaatgatcttgaatttctgattctccggcccccacagttccaaattctgggatcttaggtctgtacctccacacccagtttcagttacctacatctgaagaaaaataactctattatatttcctctttgctgagtagcttcttgagtttgtttatttatttttcaaagcatttcaagagcacggatgctcttgtgcttcttactttgcagtatctctgtagtgaaagctgcttttggatgctgtttgctttctgtctgaggctttgcctttgacttgtaggaagaagactcctgatgctcccacagagctcagctcatggtctccttgctcggtgtttctgttcctgcctttagctacaactggatttctgtgccattccctagagaccaagttagggcgtgcactgctgctgtcaaaagtgtcagactgtaagcatctgggatatatttagagtttgaactcacactgcatttgcacattaactagatgacaacaggaaaataaatgctccccttttggttgtgaagcaatgtctgggctgagagccatgtgaacttgctgctagtccacatagctctgatcctgtattgggttacaggctctctgacttgcttcactctgactctctgtctctctttctctctgtctctgtctctcccctaatgctagggattagacttgggtcctacatgctgtgtaaatgttctatcacgaaacaacacccttaggccccttgctcaccctttgtgaggaactgtggaagtgaatctattataagggtcacaaggccttaaaatcattgttactaatcaagaaccagagagtactgcctgcctcctgagataagaggactgtggtttggccagatggaaaccagcccaggatttgctgaatactgattagtctgaacatcaaaattaaaaatgacccagaaactttaaactgtagaaatgagctagtggctgctgctggggggtcaggggtagctggagtgagcaggttgtgctgtcagctgacaaggccaacagagaggactcaggcatagagttggaatgtcagctgctggagatggaagaaggcccagcctagggctggttggggataaagagactgtgactcataccagggaaattattggtgatcaaagggcttagagttaaattggatcctatcagcttgtaaggcctgtagaagtctgtgcaaagttcacctggcattttaggttgtgaagaggcaaaggactgagattgctgatgacactacagagcagatgtgtaggaggagctgcctgaataagggcaagagtaagaggcttggaggaagaactcaatgacacatagtgctgctaaggaagtagacagtttgagttgagtagtgacctaaggatgttactgctgtgggatggaattgaccatagggtttgttgttgctgttgttgttgttggtggtggtggtggtgtgtgctttatgcagcgcaggctggcatcaaactatgtaatggatgaccaccctgtggtaggcttctgaatgcaacgtcaggatgtacttgagcattggacttagggctttgtgcatgcccctcgagcactgtagcaactgaaccatacccccggccccgtgtttatatcagaaaagcataacaggaaactgctgcagtgaaaacaacccggactgaactctgctcaaccaccgtttctcagcctggcctgtctttgttgttttgttgtttgtttagacagaaccttcttgtatgtcccatgtagcctaagctgccctcaagctcactctctttcttagcctctgaaagtgctgggtcacaggtgtgggctaccaagtccagcttggagttctggaatttaagaaccgggagttgctttgactgaagcccattgttctactcattgtgaggtgggggaggccagaaggatatcattactcaagcggagcttcatcagaacactagtgattggcagaaggccaaggatcctagtgaccactcggtaggtaggcggggattatgagttctcaactgactgagaacatttagtctcttggtgggtatcttatgaatgctgtacatttaaaaataaacaagcaccgggcgtggtagcgcacgcctttaatctcagcacttgggaggcagaggcaggcgaatttctgagttcgaggccagcctggtctacagagtgagttccagggcagccagggctacacagagaaaccctgtattgaaaaaccaaaaaaaaaaaaaaaaaaaaaaaaaaaccaaacaaaaaacccaagcattatttttgattgcttagaactaagtttaaccagaactaagctgtaccagagaaaaacaccagataaccagataacttcctgtttctacagtgttcaggatgcttgctggatgcaaacctgtatgctgacatgagttttcacacagatcctccagcaccacaagtcctggaaactccacggctgtgcagttgagactctgggaaccctgccattcacattcttcacaattctcaaataacttttttgattttgtatatttaaatatcccagaatagcctcttgagctataagtttgatgatccaggaaactatttttagcaggatgagtactccgtgactgatatattttatttgagaaagacaaattgttaaaaagttgtggcttttttttttttggaacagggtttctctgtgtattagccctggctttcctcaatttgtagaccaggatagcctcgaactcacattgttcttcataagtgctggggttaaagatagatgtgcaccactatgcccaacttgagctgtgacattctgaatggaaaagactagtagggccaacagggcatgttgatgttggttacaaagctgggaggaaaaaaatatttttaatatatatatatatttttatttttattttttttattttttagtggtttagccaaaggttggaggaaggcttccaagagaaggcagatggagagtctcagcttcttcccaccttctttaaatagagtcttactccatagctttgattaattggactggaacttaccagaccaggccagccttgaactcacaaagatcttcttgcctctgcttcccaaatgctggaattaaaaatctctgctaccaggagaaggtcagtaaatctttcaggttgtgaggacactttggactaggtagtccagcacttgataactcaggtgagacaggactctgtcaaaagtaaaaccaaagccgggcgtggtggcacacgcctttctttaatcccagcacttgggaggcagaggcaggcggatttctgagttcgaggccagcctggtctacagagtgagttccaggacagccagggctgcacagagaaaccctgtctcaaaaacaacaacaacaacaacaacaacaacaacaacaacaacaaaaaaccaaccaaacaaaaaaaaagtaaaaccaatgcagtcacaggggttctgtatctcctacaggcaggacaagaatcggaggaaggacagtcaaggccaaccttaacaaaggtcagtgagtttattttttaggtgtttttttttcctatgttaactagactagcattgagctcttgggtccaaagaatccttttttattatttttacaacaaggtctcacaggaacagtggtgtcttctatctgcctaaaaacccagtacttgttgggcagaggcacacaggtcgatatagtgagctacaagctagctaggcttgcatattatactcctgctcccccctgaataaacaaacaacaaaatgaagacagaatctctgttggccaggctgactttgaggttctgatgtagctgagactgacggtgaagttctgatgctcctgctttctccttctaaggctcaggagtatgggtgtttgccatgaccgtctttcaagggaagtttttgcttagctttccaaatagctggaccaataggcatatagtaccacctccgctgacttcctcgaagctctaaaaattgcactataaagtatgtaacatggttggaaagaatcctcagtggttaaaaacactggccactcttgcaggagaccagggtttgatttccagcacccataaggcaactcacaatcaactctaattccagttctggaaatctgacaccctcttttggtctctgcagacacaactgaacatacatataaaatgcaggtaaaacacccatacgaatcaaataaattgaaaaaaaaaagtaggggctggagagattgctctgctgttaagaattcttgtaaacctgggtttgattcccagagcccacatggtggctcacaactatccccaactccagtttcttgggatccatcttctgacctctgagggcaccaggcctgtgtacacatggtacacagacataaatgcaggcaaaaccccatacatataaagtaaaactgaaaaaaatttaagaagaaaaaatctgtaacatacaacttaccattttagttgggtggtggcgcatgcctttaatcccagcactagggaggcagaggcagatggatctctgagttggaagccaagcctggtctacagaatgggttctaggacagccacagctacacagagaatcctgtctgggaacaataacaaaaacaaacctaaattcaaatccaaaactccatctccccccaaaaaaaccccagagtttaaaactaacttgggctacatgtgactctgccttaaaatttcacaccagagtcaccaaatatattcacaaggttgagccaacattactgaagttttcatcctaagggaaactgtaacagtaactgacacgtaactcttcaggctctctcctcacaagtctgtcagtcagtcagtatccctcaggccattccgggtttgtcacagggtggagtcctgcagtttctcccgtggagttcggcttctttcctttgtcatgtttcagtgttcctccacgttgttgcttggatcagtttcattcacgcttgtttgttttggcacagggtctcactatgtagacctagctggccttgaactatcagagatctatctacctctgtctctgagatctgcgctaccacaccttagtttcattctctttttttgtttttttgttttttgttttctgagacagggtttctctgcgtagccctggctatactggaactcactctgtagaccaggctggcctcgaactcagaaatccgcctgcctctgcctcccaagtgctgggattaaaggcttgcaccaccactgcccagccttcattcatttttttccctaagatttatttatttattatatgtaagtacatatgtagctgtcctcagatactccagaagagggcactagatttcgttatggatggttgtgagccaccatgtaattgctgggatttgaactcgggaccttcagaagagcagtcggcgttcttaaccactgagccatctcaccagcccctcattcattttttaaggctgcagatttcaatgtatgtgtgtgtgttttacatatacaatatttatatatacatgtacatacatatatatttatatgtacacatatgtacacacacacacacacacacacacacacacatcagtcaaaaaattcatttactgtgcaaagcccttaggttcaaaccccaatacttactaaacaacaacaaaaaaccccactcagccactattagacattcagattattatttttttttttaaagatttatttatttattatatgtaagtacactgtagctgtcttcagacactccagaagagggagtcagatcttgttacggatggttgtgagccaccatgtggttgctgggatttgaactcctgaccttcggaagagcagtcgggtgctcttacccactgagccatctcaccagccccagattatttttacacttattcatttatatggctatagttttctgtcatccaagttggccttgaattattctgttattctagggctggtctggtccttctgccactacctcttgagtgtgggattacaggcatgtacatctatgctctgctccttttggcctttggatgtgttgttctttctctccaaggtctcatgtagtccaggccgtcctttaactatgtagctgaggtaagtctttttttttttttttaagatttatttatttattatatgtaagtacactgtagctgtcctcagatattccagaagagggcattagatttcgttacggatggttgtgagccaccatgtggttgttgggatttgaactcgggaccttcgggagagcagtcggcgctcttaaccactgagccattttgccagctcctgaggttagtcttgatcttcccctgctcctactgccgcagccttgtaactgctggtatatcaggagtgggccactctccctagcttactctctttttctaaaggtttgttatgtattcatttataagaccctattaccctttccagtagcatctggttattgtctttagttcaaatgtgaggatcttctggtaattggcaaatttaaagatggtaccattttggctactaatgaatgaaatgcctccagaggcagcaataaattcggagagactcttctttcaaagaaatggtaagtgctttgtttgcttggatattaactttttgggtgattactcttactggatctgtcctctaggaatacaaaacttactgtaggccatccaatgtaagggctggccagaagactctgtaggtaccaccaggcttcatgtctgagttcaattcctggaacccacagttgtcctctgatctctacatttataccatggcacatagataaattgataaatgcaagctcagcagttaagagcactgactgctctttcagaggtcctgagttcaattcccagcaaccacatggtggctcacaactatctataatgggatcggatgccctcttctggtgtgtatgaagagaacaatggtgtactcatagacataaaataaatacatctttaaaaaaaaaacaaacaaacaaggagctggagagatggttcagcggttaagagcactggctactcctccaaaggtcttgagttcaattcccaacaaccacatgatggctcacaacaatctgtgataggatcttatgctctcttttggtatgcctgaaaacagctacagtgtgctcatataagtaaaacaaaacaaaacaaaacaaaaaacccccaaaaccctttcctgttcaaaccttactaaatactaagtaatgtattgctagttttcccctctatcacggcctttttcttttgtggaacgtcttccgagttgccactattttatgcctataactctcattgttagatcaggattgatcaaggtgatgtggaagtaaaagggaagaccaacctctcacaggatcattaccacgtctaaatcagaacagctgaaggatagatgtttcctccttggatgtggagactgtgtcagggctctgggcttgggattttatagggcagcagaggaaacttttgggtgggaagatatttctgccgacctactttgtgctttcccatgcacatacattttggtggagtccttactatgttggcatctatgccaggagtctgacatgttgatccctggtctggagcttttctactcctaagtacccgaagggagtttctcaggtgctgggggctttaggctattaaccctcacttattacctttgactagaaactctttgctctctcctgatggtgataatccagagtgtgtgtgcgcgcgtgcatccacgtgtagaagtgctgtgagggcggccatgttctgtgagggcggccatgtgctgcacagaggcttgagggagaacagatatcccctgttgctctctgatgtagtttttggaggcagggtctctctctgaaactggagctctagtttttggactaggctgctagtcagggagcccctccagttaacctcttgtctttgtcctgctaggttctcgatgacagatcgagattgggattcaaaccccagtctgtatggtttcacagcacgtattaactgtggagccatctctcccgcacggtttactgtgttggacaccgttaggcacctatgaacaagaggtgacaaataagtgaaatttaaaaatcctttcagttttgtggtgttggggatccagtccaaggccctgagcctgcaagtgttctagcactgtactctatatcctcagccacaaaacagccagaaaccgggaaacttaggatcttcctcctgcactctgggttggtaataatcagaaacgcgttgaagctggttcccctccagctttccgcaactggctaacgtagtggtcactatagtttcagattctttagtttaacgcagggtgggggcatggctgtaagtgggtcccagcactaaggagaaaagagcttccgaatttcaaggtcatccttgaggactgtcctgcaggacattctgtcccctccccacctactctatataataatgtgttagcattcacataaacgtgacactggtcttagacctcccactccacggagcatgtgatttggacccttgtgtccagctcagggaaaacacctaggactgaaaggtccctcgtctgatcacgggaagtgagtggttaaaagtaggtggaagcgtggcttcggattcttttagttagcgcttggttttaatactgagttttacgtagagccgagctgaaacccttagcgcccttagcaggattaactcgagttcactgtggggccttaaaaaaaaaaaaaaaaaccctgcagagagcctgcaaagtcactgccggaagtccctccgcggtgacgagcacggcggaagtgggttcaatgcagctccccgaagaactgtctcactcccgctcgcctgacttctggatgggaggcgccctgcagctcagggaggattgtggggggcttctccgcgcaggctcagtggcccacttcgcgtcggaccgcttccgtccccccacttcctttcacggttcctgtgccaggacgtgacgccagacttcgtcagacgggaggagccttgggaggaaaagcgtctgagccggggtctcgcgagaacgtttcgtttcagcgcagttctcgcgctgcaaccttgctcctgttgcaacgagagccttcgagatcttctccgcctccgcgaccggcgcctcctctgcggccgtggagccggagccgcggcccgagcggtagaggcccccgtctttctccaagccccaagcctcctagcggacggtcgtccggcttcgcccgcccagccgcggcgctccaccggcccacgcggctcgccctcttccacgcgccaaccccgccgggttccgtgtgcagtgtcggcggccggccctgggcccgagccggagcagtagccggcgccatgtcggtggtgggcatagacctgggctttcagagctgctatgtcgctgtggcccgcgccggcggcatcgagacgatcgctaacgagtatagcgaccgctgcacgccgtaagtggggcttggctggcggggtcgcctcgctttccgggcgagggtccgcaggagacccccgccgagtgccgggtcgcccgcggctgccacctgcttcggatcctgggcctgcgccaggcacgaggccctttcgcgcgggccaaacgaaggctttgagccggtactctgatcggcggagggcaggagcaggaactgaaagagaaggcgggcctgagaccgtgggatggaccgaccgctctcacctccttttttggggggggggagggtttgggtggttcggtctgaaacgaggtccagggcttgctgagctcgtcgaatccaatagaggttcaaactcggcccacggcgagcatttaataaaagttaacttgcaagattgtggcctcgggactgggaagcgctctgagtcccacgtgagtgggggcggggtggcgcccggaagatgtggagtctgagtacccacggcaggccctgaataaagtccatgcttttcttgatagcgttttaactcccttcattcgtttttggatattgagttaggttgggtcattccttacccaggctgctcacctattccttaacagcgttagtttttcatgctaatgaattccagccggaaggttgccacaattgttaatgcatgactcaagggctctgtttgacttctagaacttacatgaagttatgggaccagtatagacaaatctgcaaaaaaaaaaaaaaaaaaaaaaaagactcactcagagcttgctggagtaaaagggagtctactttttagatatatgtaggattttttcccccacatttagcccaggatgacctaaaattttcattctgcttctgtctgctagaatctggtattacaggtgcgttaaaattttatttatctggcgctggtggcacaggcctttaatcccagctctcgcagggaggcagaggcaggctgcagtgagttcgaggccagcctggttcatagagaccatttcaggataggcagggctacgcagaaaagaaagctttgtcttaaaaaagatgttaatctactgaattcctttaggtaaactttggaagaagctctgttgtttttgggttcacagtcccagatcattgtttttatcttgtttttaaccaaccttctgaggccagtttcctgtctcccagactgttttgaaataactttgtgtctgggaatgactcttaatcctcctcccttcatctcccaagtgtacaggtgtgcaggcacaacacccagtttgctgtacagtgggggcttgaagccagggcttcatgcatacaaaacaagcactctaccaagtaagctattgcctggcacccaattctcgagtttggtgccacagagctctggtaccattatcagagtcagttttcaacgtcccttcccaccccagtaccaagctctcttcccatttgtcctttttaagctaggtattatgagtagtctttgtttgtttgtttcttttttttgagacagggtttctctgtgtagccctggctgtcctggaactaactctgtagaccaggctggcctcgaactcagaaattcgcctgcctctgcctcccgagtgctgggactaaaggcgtgggccaccacacctggcagtatgagtagtatttgtacagaggtatcttgtactggcatttgaaaagttaaacatttttgcttctagtcattttagcactaatttcgtatttggtaatgatgctgctggttcctcacttttgggaagatcatctttccaagaaatttcaacagtctgagctgaagatttggctctttgggcagagccttgacctgcagaagcctgaggcttgggaaacactgctcctacctagccttcctttagattgcctgaacctgctcctctcttagatggcagctgtggcagtttgccatgagtttcattatttgaaactttaggagttgttttctgctggcagttaaatttgcataaggactgaataggtcattaatcctgtgattgtgcacactgcatgcatacttcctttgccttagttttcctatgtattttatttttttttaaagacaggctacatagctgtggctgctctagaactcagtgcaagacactgctgggagtaaaggtgtgcaccaccacacccgactgtatttttttttttatatgacaaggcctgactcttaggctagcttttgagggaactacagaactgcagcctcctgagtgctggcatcacaggtgtgctactgtgtctggcttcatttaaatactctgaactatgcatttgattaacagatttctatgttggaggtgtggccttaaatatcagagcagaaagttcagagtcttttcaggttgtggaagaatagatttaaaagtatgcagagcctgtgttgtaggtttcttccaaggtgaaagtgtaaaggtgtgggtctctggtttgactgtgacagggagatgcacctcatttgtattctaacactctcagttctacctaattctgtaaagacagatgaaaaccttatgtacttcattgattatttcacatgggggtttacttgaactcgaggagtagccaaatctttgcctttccatctcctttgttttagtgggttatctagtgtgactgtggctgtgttaagcattggagatactttgatgaataacaaaatgctcagtcttgccatcatgggcatggtaatggaaaaagccacaggctaaacaagagcattctattactatctggtgaagaacaaggtggaaaagtacagaatatggtgtaactgacataactagatgtgggctgcttctaaaatgtcatttgtgacctggaaggtaggcacgagttcacatggaggccacggtgggtttgaaggaggagttatttgagcaaatgggaaggcctggggcaagtagtgtttttacagattgagaggatgatggcacatcttgaggcaaggcttggaatggttaagatttctcttgttagtgcagtagaaagtgagccagtttttttttttttttgggttttttttttttttttagatttattaattatatgtaagtacactgtagctgtcttcagacacaccagagggcatctgacctcattatgggtggttgtgagccaccacgtggttgctgggatccgaacttaggacctccagaagaggagtcagtgctcctaggcagcccagcactcttaaggcagaggcaggcggatatctgactttgaggctagcttaactttgtctacagagcaagttctattgctacacagaccccgtttcaaaaaacaaagagaaaaatggcttctgagaaagtaagaatggatatgagaaaagcaaagaggttgatacagaggagattgccttgtgtggtagcagtgggagagaaatgagcagcttttgagtcaagctgagtttttaaacttaatttcttactctagcattatgcgtgttttattgagcacacttgccatggtgtgggtgtggaggtcagggacaacttggaagagttctaccataatgtgacccaggtattgaactatgtagccaagagtgaccttgagttccttcagcttttgatccttcagcttccacttgctgagtgcagggggttttgtacaccagtacgcctggcctgctttttttcttcactcagtgcatagaataatagtataataccagaagatttgccattagtctatttttgtatttctctctctccttgaagacagacttgcgttgtccaggcaagagtggactcaaattcatgatcctcctgcctcagtttcctgagcattgatattctaggcctgagctgctatacctggaccttttatatttttgattaatactctattagctatattataatgacactaagatgaaaccatggaaatttgtgcactatttttttttaaagatttatttttttattatatgtaagtacactgaagctgtcttcagacacaccagaagagggtctcaggtctcattacggtggttgtgagccaccatgtggttgctgggatttgaactcaggaccttcagaagagtagtcagtgctcttacccactgagccatctctccagcccttgaatgagtctttaagatgaacaagtataaataattttaaagaaagataggtggttagattttagaggacagcttggaaagccaatttttagaggaaatagttgggtatatttttgtatgaaacctagtctatatggctttttgaagctataatagttgggttttttattattatttatgttgtttgcagtctgtgatatgggctttttagaagtggataatcaaaaaatgttctttagcaatgtattgagatggatgctgtaatttcccccatatcatgtaagtaaactatatttcagactaggaatggcccagctaggaagaagcccatagtatgtttgtaaagcctcagcaacttgtccatgcttgtctccatcacccatagtgatcgcatagagtggaaatgctgcaggtctcagtactagttcatggggtactgtgtgatgattccttgagaattttatgtatatataaatatatacaatgtaatttggacataccccttcctcctcctcattcttgctggatacctgctccccatatcctttcaccccaacttcatttcccaccctcagaacccagtgagactaatacctgcttacaacattgccagtgctctttcaattcatgttactggtcctttctcctcccgccataacttgaacacaggatgtcatgtgatctcaggtatctggtttagtctctaccactgagctgtataccctcagcgaatttattcattcttcaacagtttcatccagatatataatatattctggtcacacttgccttcccccacccctgtgacctaatacttttgaggttagagtttgaacaaagggcaggaaaagtggaagatgaataacattgccttatgttaggattgtgttcttgtatagttcagaaggcagatctggtgatttgtagaaagatggaagtttgccaagcgttaggctaggcaacctttttggagtgggattaatggagtaaggttattttttttttaaagggcagtgtggcttgtgatagcgcatttaagtggtttcttaggagatttcttttctttttaaaacctgctcttttaaaatagggactacttctgtctcggcccaaacagagagctcaggactcagagaaaagcccctgagctccctggctgtgttctgtctgccgtggacagcatagcacacagaggcctgtaccaccttgtagatgagcttagagagttcttagcctctgaagcccagagaggcctcaattctctccagcccccgtcattagtgtaatgtaaacatctttatctttattttacatgtgagctcatgagttatgtgcagatatcgtagtatgcctgtggggtgcagaagacagcagcttatgacaaatcagttcgcttccaccttgtggggcctgggattaaatgtaggctgtcatgcttggttagcccctccaggactcttccgtcttgttctgctgaattggaaaatgaagtttcatgttcaggagttagagagggtcaaagctggggtatgaagtacagagacacggtctgagtccatcactttcagaccttagaggagtcaacttactgttctgatgacattccttttctctgatgaaggaggtaagatgggatgcttctgaggataagcaggatagtacatgaagcaagcaacccatagggtcaccgttaacaaagaaggaaaggagagatcagttactggaaagggagatgacatatgagcataaagagaatatgacctggttctaggggtattagcatgcaaatcaagtgtacataagtgcatcaattccctagttagtaacttacttttttttttttttttttttggtttttcgagacagagtttttctgtatagccctgactgtcctggaactcactctgtagaccaggctggcctggaactcagaaatctgcctgcctctgcctcctgggattaaaggcgtgcgccaccacgcccagcgtaacttactttttaaacataagagtgttttgtttataacatacaaacaggattctgttttttctttttaaaagaagcagcaaaggaggttagaataatgtctcagagtacatgctgttctttcagaggactcgagttcagttcctagcacccacttctggtagctcatgagtgcctgaaattccagctttaggagatcgatctgacatccctctgtcttcctcaatcatatgcagacatatgtgtagacataataataataataataatacagattttcaaaaagcaagtagcccaatccagtatatgtatgattgatttggaatagtgttaggtgggagtaaattttcttggcagtatactattttattttgtctggaagatctaaataaattattctttttttctttattattttttattaggtattttcttcatttacatttccaatgttatctcaaaagtcccccataccctccctaaattattctttttttcacacaagtagggcaggactgttttgcttatttctattttatatcaatgagtgtaatatgtgtgtgtctgtgtattacttgcatacctggtgcctatagaggtcagaagagggcaacagattccctggagtagagttaaagatggttgtgaactgcagtgttggtgctgggattagaactcctgttctctggaagtacaggagatgttcttccttgtccactgaacccaagagctgtcttaaatttttataggctgtattctttttgtttgtttttttcaagacagggtttctctggagttcctggaactcactctgcactctgtagaccaggctggcctcaaactcagaaatccacctgcctcttcctcccaagtgctggagttaaaggcgtgcgccaccactgcccggcgactgtattcattttgaagctgagctgtgttaaaaaaaacaagactgcttgatctgatacgggaatatgttgctttgtactaaaatgtgaacatgggatgtggaagtttagggtggtaggtcttgtccaccttcctttagtattttatacaggtggttatcaagacctgtgctccagctttgaaatgacagaattcatcctaaggcagcctatttcatggatagttttatgaaatagaaatgtcaaaatcatagataggtcatgtgctgttaaaatatgtggcttacactttaaatcacatataagcaacactacttgaattcagcagattatattgtgtgtttaacaataataataattagggctggagagatggctcagtgcttaagagcactgttctctctcagaggtcctgagttcaattcccagcaaccacatggtggctcacagccatctgcaatgggatccgatgccttcttctgctgtgtccaaagagagcaatggtgtacacacatacataaaataatctttaaaaacaaaaccaaaacaaaaaaataaaaaggggccgcaaatttaaggagagtgggaaatgtgtgtgggaagggttggaaggaggtgggaaatgatgtaattatattaattcaaatgtttaaaaaaaacatggattttaagtgatactcagatcttacctgctggggtttcagatgtattataataaagtctgattcctcaatgtttttatcttttagggcatgtgtttcttttggtcctaagaatcgttcaattggagcagcagctaagagccaggtatagttttatcttcctcccaaaatgacttatttctttgatttatcctttttttttcttctctgatttatctttattgtcactcagcaccagagccctctttgatgtacttgtggattttcttttcctttcttttttttgatgtaggttcttgctatatgtcctaggttgtcttagaactctgtagctcaggctggccttgaactcagtctttctgcctcagcttctcatgtgctatgtgcctggactcttaaacagagttaacttttggtattttaaatgctctttgaaactattcaaaggcctttcacctttatatctaaggttattgttaagtaggctccacaggaaaggcctctagacctgaataggcttggtgacaacttgcattgttctttgtcaacaaggatcttgatatatttgcttgtttcttagtaaccagagcaacagaagctccaagaatctgttaccctgaatgtctgaggtagctgtagagttaaggagttgcgtgtttcaccttgatacagttcagtttggagctgcaaatatgtgagtagcttttttgacagacaggacccaaaatgagcctaagatgccgctggggctggggagatgacccagtgagtggtaaagtgcttgcttctcttagaaaatgaactgggaagaagtagaggaaaaacctggacattgactttatgtgcacataaaaatcagagaagtttcttgcctggggatggacatcagttggtagcatgcgtgagtcctgggttcagtccctagcactacataaaaacagtttgttttataatcccagcacttgagagatagtgtcttagttagggtttctattgctgcagcgaaacaccatgaccaaaagcaagttggagaagaaagggtttattgggttcatgcttttacatctctgttcattaccaaagtcagtcaggacaggagctcaagcagggcaggaacctggaagcaggagctgatgcagaggctattggcttgctctccacagcttgctcagtctgctttttttgtttgtttgtttttcgagacagggtttctctgtgtagccctggctgtcctggaactgagaaatccgcctgcctctgcctcctgagtgctgggattaaaggcgtgtgccaccacgccccgctcagtctgctttcttaaagaattcaggactatcagctcagggatggcgccatcgacaatgggtcctcccctattggtcactaattgagaaaatgccttacagctgaattttatgaagccattttcttctcattactgtagctcgtgtcaggtgacataaaaccagccggtgcgtgtggcgtgaggattgacacttctcattggctacatagcaagtttaagggcagcctgggataaatgagtagagaccctgtcttaaagaacaatggtgcttgcttagttggtttttacttgagtgttcatagtcttatttttgaagaatattctgaaaaattttagaggcataacaaaattatcaaatgtttgttttataaacatcactgaatttgtttgaaactactttccctactgaacagttactgttcacaactgttgcacaccacctgcctgcgtctgtgctcaagaagtgattgtgatacaccgagtttctgtttcaggccaggtctgactttggaggcctcactggtttggcctacatggagaggaattaattgtatagagagctttttctacctgtgcaggctcctgtgctgtgagttaggagcacacattcatcctggaactttaaatgccttccactgttcctgttagttaccgtctattctagaggagtttagaaatctagaaaaggatagggaatgtggaagtcaaccattacggagagaaatgaaatttttgatttttttttttttttttttttttttttttttttttggctttgagacagggtttctctgtatagccctggctgtcctggaactcactttgtagaccaggctggcctcaaactcagaaatttgcttgcccctgcctcccaagtgctgggattaaaggtgtgagccaccactgcctggcaatttttgactttataagcatctagaagtgtttcttttctaagtgagatcatgctgctcagtgtttttcctattagaagtggaaaaaattatttttccacttaaaaagtattacccttacagtatttcagtatttggagataaagttttcacttccctgttacaagaatagttgaaaacactctcccaaatagcctttgttctgtgaatgtactctggtcatttttccttcatggggctgtgtgtgcgtgtgtgctagagagtgaatccagagtggtgtacatgctgggtgtgtaccacttacaactttaatgatatttatgaattaataagtattgatgagtttgttcttggaaagtttgaagcataaactgtgagcagttttagaagctaatagtttctggaaatattaaatgtttaggaacaaaatattttggtaagtgcagtggcctgacttgatggagaggaaaaacatgctctagatagtctttagccctgccagtgggacccatgtaagtcccttgttctcattttacttgatttagaaggactgaatgtctaaagaaaatggaaacttggacacctgttccttccatgtcattacttcagctccttttttgtgtgtttaagcatttgtaagattgttacattagatggattggtgaagtagccatgttctcctgtcctacagtagagttttaccagggacacatggttagaaatagagaataggacagtttattaagaaagggaaagtacgcatgagagatagagtaggccaggcacctggggaaaagcatatcttagaagcctgttggctttgtgtgtgtgcacacgcgtagtactcgaggtgttcttcttatgacatctccttacatagccctggttggtctagaacttggcaatttttctggtttttatccctagaaggaaatttggcgaattgaaaggatcctaactaacccaaggctgttgaaaattggaaatagaatggtttttctatgcatttttcttttttaggtaatttctaatgccaagaacacagttcaaggctttaaaagattccatgggcgtgcattctccgatccatttgtggaagcagaaaaatctaatcttgcatatgatattgtgcagttgcccactggattaacgggcataaaggtaaggatctgttgatactgtgttatgaggccctatttcatcagttcagtgtgtgttggtgtagttctcgtgaagctgtaatgaacactctctttacacctttatttttatcatacacgaatgaggctttttttccacgtatgagtattttgcctgcatgtgtgttagtgttctgtgcatgcctgtgcttctggagttcagaagaagatattggatcctctgggactggagttagggttttgcaccctcttgtgtgggaactgaattctcatcctctgtaagggcaggcagtgctcctaaaccctcagccacttttcagaccttacaatgcaagtgttaaagaacgtttcttgctgattaaggctgatagtctttgagtgatagtgatagtttttgagctattgatggtgctgtttctctgcattggaaatctggggagagacattaactctgtcactgctattggtagtgttcacatagagagccacctttccaaggtgatattagtgaagtcttgtagaagagcaggccaaagtttcattagccagtctcactgctgtagtcatgtcagtagggctgaagctgcaaacagatgttctagggaagagtgcactttgtctttgaaacactcacagaagaatctctgtggagcagtagtgacctcatcacactaagaggctgggatataggctggggtgctgacctgtgtctcctacagtggagtaataggaatgtaggccagtgagcataagagtggtatattatgtgttatggttgtggtttttgagacaaggtcttattctgtagcctaggctaggccttgaattcacctgccttggcctcttgagtgctgagattacacatgctagccaccatcctcagcctggtgtggtatttgagatcacagcagttgtagaactaaacatcctgagaatcttaattgagattcaaatgaagctgggagtagatctcagtagtagagcaatttatgaggtccatattcgaatctggtaccacaaaaaaacagcctgcagaaatggagaagccgagcagtgaagttctggctgtagctgagagctcagagctgaggagcagaggctctccttaagatggcttacctcccggctccgtgcttgtgagctacacccacagaggtgttctctgtgtgttcctctatacatactgtggcatgcacccaccccctcaaataaatgtaatttaaaagtgatgactaggtttatgtaaggtaactgtggcagtagtctcagaagagtttgaatggctcactgagggaaagcggaaaaggtattgtgaggaaatggggacttgttacagtcaggaaacagagcagatgtgtagaaaaagaaagaaggaaagaagatctgggggaactggtctgtctctgtagacaaaggtcatagggactgaccaaaagccaagcaaggtcagtaggtggggcaggttatgaagggactcagtgagggaagtctgtccctgtctctgtgaagtgaccaagtgtcagcttgtgtctcagttagggttggagggagatggttgctcagtcaagctcttcaaagttaagagaggttctgttttggatcttagctgctgggtggggctaagggtagaaggatgggttatccaaggcagagctttatcatgaaacatttcctgagacctggtcatcatttattctttaacccagtaaacatttattgtgactgtgtgggttctggggcaaaaccacctgtgtcctggttggggagacgtctaatgtgaacacagtgtacagtccacacagtatccgatggcgaggcagtctctcctagcagtcctgtttatggcaggagggatggtttgccttcggatcaggtcattgcctcaaggtttgctttacgttgtgattgtcttttgctaaatgtcatgtatattaaacaaaaaggtaacattcttcgtaaagataacgttcttcagtcccctcctgagatactgccccattgactaggacatgaagtggactaaaattggatccttttgttttgttgcaggttacatatatggaagaagagaggaattttaccacggaacaagtgactgccatgcttttgtcgaaactgaaggagacagcagagagtgttcttaagaagcctgtggtagactgtgttgtctcggtgagttgtggtagactgctgtgttgtctcggtgagttgggctcgagctgccttaagaactagagaggaaaactgtttttactgcaagtacaaattgttactgtgttgtgtggtcgtggtgttttgagacgttcctgctttgacacagtcttgctgtatagtccaggctgcctcagtagttaatgtttctgcttctgtctcccatgtgtttgggattgtagtatgataccatgctcagaaatctagttttcattttctttggttttcttcctttttctttttctagttttggagacaggatctcactgtgtagtgtgggctggcctgagcttgctgtgtagaccaacgtggtcttgcacttggctgccattcttctccctgtgcctcttgcctgtgctggaattccaggcatggctcagcttgcctggctgaaaggatcaccaccaccacgctgcccactcacccagtattttttcagtacctagtgtagtgcttagggacagggtagctacttgattgaatgaattgaatgttagatgtctgccttgcctccttttttccttcctgcctgtatctagttctagaaaacatcgttcagttttctgtgtgcccttgttttgatgggagcctggctgcttgtagtagggtgtggtgtggtgggtctagaggctgtatgagtttgccacgcagcacactctctcctcctgccattgttatctgattgtcctagttagggttactgttgctgtgatgaagcatcaggatcagaaggaacttgaaggaaagggcttactgactcatgtttccatatcacttttgatcattgaaggaaggaagtcaggataggaactcgagcgtggcaggaacgtggaggtaggagctgattgtccaggccacagaagagctgcttgctgacttgctcctcgtggcatgttctgcctgctttgagacagagcccaggaccactaacaggatagttccatccactgtggactaagcctttccccatcaatcactaattaaggaaatgccttataagcttgcccttaaaaatttatttatttatttatttatttatttatttatttatttattatatgtaagtacactgtagctgtcttcagatataccagaaggggtgtcatctcattacagatggttgtgagccaccatatggttgctgggatttgaactcaggacctctggaagagcagtcagtgctcttaactgctcagccatctctccagccccaggcttgccatcttatggagacattttcttagctgagactccctactcttgttgacttgtgttgagttgacataaaactatcccccacactgatgttttagctctttggcttttttgtcttaatgggtacattaattagcaaagcagattcttttggctgcctttttcactgcagattcttgattatccagcaatttggtactgatacagataatgattgggtaatagttgtggtccacattctggggattggaagaatagaaaggctgttaggagcccaagtgaagtgattgattacttagtgcagtggttctccacatgtggatcatgatcctttaggggttgcatgtcagataacctgcataccaaatatttatttacattacgattcataacaggagcaaagttttagttacatggtagcaacaaaaataattttatggttgggagtcaccacaacatgaagaaatgtattattaaagggtcgtaacattaggaaggtaactgaggtgtaggtatagagactgtgtcgggttctctaccattcctctctctccatcgggctcccacacttgacctctttcctttgtctagtgccttttactttgagtaatgctcacataacattttatgaaatagtggggatatctaaatgtttttttttctgcttgatcccattttgagggacctgggttttaaaggttagttttctaattcttgcttagaagtccttaagatatcactgagtttgagtgatgtgctggcacaattcttttgcagtgacaggccgctgcagtctgcagggaaaaggcagtggagcagcttgtgtaggaagtgaggcacagtgctggtccaggtgtgcttcatcccttcagcatacggtgtagaaacatgtatgacacagtttccatccacaaaatgtggccggaatctaagttcatggttattttggggtttggtttcctacccagcatgagcatggacagcattttggacttgaggatagcagtagtcagtacagcaatattgctaagtagaacagtcagctgtttttaattgcttaaggaaaaatttccggcagtttattaagaaaaattttttgagcctggtctatttatctctgctacctttaaatatgctgggattacaggtatactcctctaaaattagcctgaggaaacattttttttttttagtttttcgagacagggtttctctgtgtagccctggctgtcctggaattcactttgtagaccaggctggcctcgaactcagaaattcgcctgcctctgcctcccgagtgctggtgtgcaccaccacacctggcaggaacaatttcttaatctgatttctagatgtcaactttttgcaggcctttgtaaagagaatgtttcttttacaggttcctagtttctacactgatgcagaacggcggtcagtgatggatgccacacagattgctggtctcaattgtttgcggttaatgaatgaaacaactgcaggtaagagggattaacgaggctaggtggcaaattcctttattcccagtattctcagcagaggcaagcggatctcttgagtccgaggccatcctagtctatagaataagttccaggacgccagggatccattaaacagagaaaccctgtttcaaaaacaaacaaaaagggggaatgaatgagacagctgcagatgacttctactctcttaattgttaaatactgaagctgcttaacattgatcactgtgatggtaatgttccacatgagtaaaattatgcagtgtttataaagaaattgattgtctccaacacagtgcccagtgtagctttagcttgttcctgagatatgaaatgtgtcctttttttttttaattgattaaatgaatcgtagtatttagaagatactctgttgaacttacttttttccctcttgtgtagttgctcttgcttatggaatctataaacaagaccttcctgccttagaagaaaaaccaagaaatgtagtttttgtagatatgggacattctgcctatcaagtttctgtatgtgcatttaataaaggaaaactgaaagtaagtatttttctagaaaactggaaattaaaatttgataaaatttgattagatttttgagtgacaaattattatttttttcaccaattggaaacatgttgtgagtcacctgagctggaatgcagatatggtgggaggagtagaggtgtgggccccaaacaagctttatgtagagttggtgtggtgtgaagtcgagaaagagtatgaacttcgaggtgaggctcccgagatcgctagtcgtaatcgtctcacttggacggtataggaagcagcccatcctctcgggcttcttcggagcattttccttggtaacaacagagaggatgtttaaggtgctcttgctatttggagagttctagaaagaggctcttgattgaaattttggatgctaaaggactcaagactagaagtgatagtctaggtttctagaacatttacagctctagagtaacaaccattgtatatagaattgtagagctgtttaaagagagggattgccacagtgtgcatgtctggctcctttgaggagttacacagtgaatagaggctagtggtccctttggctaggtaactttatctaatgcttgctttagttgagtgtgtttcaagattcttggtgctaaggtttaaatttgccccccagttttgtggtgcagtgtagggaggactaacgtgaaatcatttgagggcatttttgggttctagtttgttctgtttctttttctttcttcttcctcctcttttgaatattagacttggttctgttttactttcttatctatattttcatattctaggttttttgttatcaaacattggttgggaaatgagtatttataagttttatagctataaattgtgggtcagacataattctcaatgttcaggtaatactttaaactgcgctggtagctcatgactataatctcaggctttgggaagcaaaggcaagtgtatcatactgaagaccaatgtgatctatatagtagggaaaaataaataaaagagttggtaagatggttgagtggatgaggcatgcttgcttccaagcctgataacctgagttcaattcccagcactcacaggataggagagaactgagttttgaaagttgtaccctctctatccatttatgcattctcaataaatatgtaaataaatgtgttaaaatacaaaaaaattagccactgtcttagggtttcattgctgtgaagagataccatataaaggacgccatataagaaccactccataaaggataacattaattggcactggcttaagttcagaggtttcgttcattatcatcatggtgggaagcatggcagtgtccttgtagatatggcactggagagggaactgagaattctgtgtgttgatctgaaggcagcagaaggagactggggcatactgggtgtagcattagagacccccacccctacttcctccatacctcctaatagtgccactccccatgggtcaagtctgtgaggccatacctattcaaattatcacaaactactgatagagttatttctaaaaaatctgacactttcacatttaaaataattgattggatttcgaggcaaggtctcacattagcttagtctggtgtgtctcagcgtggaattctgggattgcagatgtgtacctgtacacctagctttattgtattatctatttggggcgctaagggttgaacctagggtttcaggcttgtttagcaagtgctttattgttgtgctacatccttatcctcagttggaatccctgtactcaaatctatatccagtttttcagttaacttactaagaaaatttcttgagccaggcactggtggcctgtgcctggggtcgggggcggtagaggctgttggatctttgtgagtttgaggctagcctggactttagagcaagttccagggcagtcaggactacacaaagaaaacctcgtctccaaaacaaaataaacaagattcttaatggatttaatgttcattaaagaggttacgtttatcaggttttgttgcttagcttgtcatcacgtactggatctgctttagatctaaacttgcaatcctgctacagatgtgaaaaactgtcaatgcaagtttgatagacttaagtggcacataaaaacacaattatgcctaacatttctgcagctttcaggcagtgaactgattagaagttggtacaagtgtttggtcttgagtgtgaaattcctcttgaagtggtttctactacagtaagtgttagcaacctgaagatggccttttttttgcttccacatgatgtgtaaagtagagattatgaagtatgttatttattgctcacgttggagttgatgccggtctggaactcagaggcttgtggcagttgtcttgcctcatcctttggaagttgagccatgccttttcagagtgtgttcgtggtgtttcctctcatccccccaaagaaagaaaaaagtttatttagtatattacctggacagtgatgaaaaggactgcctgtttcatagtgtagcgttagcaagtattaatgtgcagcatcctttttttcaccctgatgaacacattttctggcctttaggaaatagatgatggccaggtggtggtagcacatgcctttaatcccagcactctgtgagttctatgccaacctggtctacagggtaaattctaggacagctagggctacacagagaagccttatgtgaaaaaccaacaaaaataaaagtaataaaaataagagtgtatgtatcatggtaaattttacaattggttaattttttgattatcctctttttctttgaaggttttggccacagcttttgatacaacattgggaggcagaaaatttgatgaggtgttggtaaatcacttctgtgaagaatttggaaagaaatacaagctagacataaaatctaaaattcgtgctttattacgactgtctcaagagtgtgagaaactcaagaaattgatgagtgcgaatgcttcagacctccctttgagcattgagtgttttatgaatgatattgatgtgtccggaactatgaataggtaaccatgttcttaatgttaaatgagcaatgacctttattttgtttaactgattaatgaaaccatggtggttaacatgttaaaaattacaagccatttagaacccagttttcatttaaaagttgtatctagtggttctagtaatggagactgaaacttttattctggtaactttaatgtttctgaaagtcactagttaattcaaatatgtattagacacaaatgactgggaaaactagtgaactgttttaatgcagaaataggatgaatttaacttaggcaccaatttaaaaaatgttctttttgagtagttcaggatcatttgagggcagtatcccttttatacagcactgcaagaattctgggtaactgacatttaaggttatttcagaaacactcagtgttattgttgcctgattgtgttgcttggatgagggagtgagatgttcttttggctgtgaactcctggtggaattcaggcaagactaatgacttgtttggagaagtgtgcctgagtgacccttaaaaaatttgagatggtatttattgttgaccagtgttcaagtatatcctagctcacccttttctcctgcttggaatttttcctctttgtttttaatgagtgtgaggcctccctcctcctcctgtgtgcaagagaggtggggtgggtggagagggaggggaagagggagggagggagagagacaaagacggggaggccaatatgttttaaaaatttgttaatcaaatgctgtttataagagttaaggtgtgtgtgttttcagactctgttttgcctgcatgctgttcttttttttttttttgagacagggtaccctgtgtagccctggctgtcctggaactcactctgtagaccaggctggcctcgaactcagaaatccacttgcctctgcctcccaagtgctgtttttctaatgttaattttttatgtgtacgggtgctttgcctgcatatatgtctgggccacatgcatactttgtctttggagaccagaaggagaactctggcactagaattaaagacagcagggccgcatagtgggcgttagaaattgaacctgtgtcgtttggaagggtgcactcaagaggcagaagcagacaaatctctgagttcgaggccagcctggtctacagagggagtccatggacagccaggactcagttacacagagaaaccctatcttgaaaaacaaacaaaaaaaacaaaaaaagagagagagaatgagaattgagataatggctcagtaggtattgtgtttggttagaattcctggtttcagtttctatcaacctataataggttgatagtcttagaagttcaagatcaggctagagagatgacttgacaagtaaagttggttactgtcaagccttgtatctgaggtcagtccctaggatttccatggtagaggaagagaacctccatatgtgtgctgtctctgtctctgtctctctccctccctctctctctctctctctctctctctctcacacacacacacacacacacacacacacacacacatacacaccactcactaaaaggaaacacaaattttagctccctagtttgaggttggcttggttttcatgaaacgtggctatcctgaacgtgtcatttccttggcagtaatcaaagacaaggatttgtcgctctgggtagggacagggaaagcgtcacttcatttaatcttctgtctgggtaaatgtgatatctcaagttaggcagctgcttgaatatgtaccatcaaatgaggttcaggccagcctgggacacggaagatcctatctctaaaattcacacaccatacagtgaaacacttcacagtgaccagttagtaaacacttagtacatgcagtgctatgaagcatcacttgtgtataatgggaacagtcattacgtagctaaagtcctagagtcagtcagtctgtttgtctgtctgccagcagttctcctttgggtctggttcagattttatttgcattctctgcacatatcctagcagtggaaccatgcatgtatgtcatgtgtgtagtgcatgatagttttgaggtttattcgtgaagtgttcaccagtgcatcgttacctgttctggcaaatgtgtgcattcatagtcagtgtttagtgatggtttgagaattgaggcaggcagatttgaacagagatacttcaatgtgtgtttttagttctttgaggtgtgcacttaggagtgtaattaattgttctcatgaggtagtgcttaaaacctttccttgtgtgtgtaagccactttttggagcaccatcttcccagcccccatctggctctgttcttaaagtaagcttgtctgaggaggagttgagtgttctttgtgttttccagctttgcttttcttgaggaactttgcctttctgggatgtgacagtctctgctggcttgtttgctcttaaaaactttgtggttactttccctatcttaatttttgttcatatataatttgttttcacttcctggttattttttgttgttgttgttgttgttgttgttgtttgtggctgttgaggtaaacttcatataaaagaatctaccattttaaatgtacacttcaatgttttgtatgcattcataaggtggttactcttggccactgtctaattatagaatgtttttgttatcccctaaaagagacggacgctccgtcctgatagcagtcttcaggagttccttctagtctcagggcagagactctggatttgtatattcttttgtgcattttttgttgaaatgcgtatttctaggttctttatagtttttctgctccagacccttttacttttgtgacatagttgtcactctgtatacctagctggcttggaactcactgtgatgcaggcggctcttcacctccccagtctttctccccagtactggcattacatcatggctgcttccttgggctttttttaaatcagggtttgtaagtctgtgtagctctggctgctctgtagaccaggcttgacagagttccacctgcctctgccttgggagtgcagggattaaaggtgtgttgccaccattgcctgaagaacttttttgcttgcttttttttggacacaggttattttgtttgttgactttgaactcttttcctttctgtgctactctggagtgctagggttgaggttgagaaccaccatatcctgttctaagtatagtgggatggagcgcagggcttcatgcatgctaaacaagcattgtccagctaagcactgtgcccaggccttgggaagcagtgcttagagtggtttttcttcctttttgactttacttctactttcttgcccagtttgggtttgtttatcagtgttttttctttccttacattcttgtttcccttttaagagaactttttaaaatgctatttaaaaggtttatttttctgtatgtgaatgtttgcctgtgtgtatgtaggtgtaccatgtgcgtccctggtcccttccttcagaggtgagaagagggtttggattttctggaactggagttgcagttatatgccattatgttgggtctagaaaaagcagcaactgttaacccttgagccaacatctctaaccccttttaagggaactttttaggtttgccctctgttgctgtcctgtcttatcaagggctcttttatttttccccccaacaaacaaaacgtatcttgggtcattgcatggattattttttgaaacaagtacatatggaactggagatgtatgtgtgtgtgtatgtatgtatatgtatgtgtgtgtgtgtatatatatatatatatatatatatatatatatatatatatatatagttatatatagttacatatagttatatatatagttaagtggttatatatatatagttaagtggttaagaggccctgggttttgttccagtgccatcctggtaacttacaaccatctataaccccagttctaggggatttaacactttcttctgatctgagagtaccaggccatgcacgtatgtacatagatgcatgcaggcaaaatgaccatacacataaaataaatataaaaataataaaatgtagatatagaataaatcatggatggactgtgagacatgttagttattagactcattttgaaataacttgagtattgcatagctctgtttatataattatgttcagagcagattaaactaaaacccaaaatagttaaaaaaaaaatccaagaaaaacaaaaaaaacaagcaaacaaaaaagatagatggttgtcaaggattctggaggaaaagtagagatggatgggaacaacctgcccaattgttaagcctgtagacaactggcagagactcctgtcagtattcactaagtgtaaaagatcaccacactagttcgtgcacaaggtgtagacagaagagctgtgctctttttctaattctaaaccaatcttacagagaagaatttttttcaagatcgatcaatctatctctatctatctatctatctatctatctatctatctatctatctatctatctatctatcatatataagtatattgtatctgtcttcagacacaccagaagagggagggcatcagatctgattacagatggttgtgagccatcatatggttactgagaattgaactcaggacttctcttttaacctctgagccatcttttcggcccacagagaagaatttgatatatgttaatgttctctctctctttctttccctacccaagctggcactgaactgttgtgtgtatgtgtgtgtttgttgatttacctatcctgagtagttcatatagctggagtaaataaaagatgtcctttgtttgacttctgtttagcacagcactttcagatctagcctgataacacccatgagtcagttcccttttcttcctaagtaccattgacaggcatttgaattgtttttgctttctggattttatgaatcatgttggaaagcatcctatcatgtacatgttttatttccgtgaacttatgttttaattctattagcgtgcgtacccagtgtagaattgcagtcctctggcaatgctgttaaagtttagcattccaagcaaaagccagactcttagtgttcatcttacattgcccagaaacatgtaaggcctgcagttcccaaatccttatcagtgcttgtcattgccttttgttttacgtataagtggaatgtggtttaatctgtattatttctttactagaggcaaatttttggagatgtgtgatgatctcctagcaagagtggagccgccacttcgaagcgtcttggagcaatccagtgagtacttttgtcattgaattaattgtttgtagatctcagactctggggatgtattgcatgttatcattttctcccagtcaaatatttgctgcatgaacactgtcagtttagtttcacgctataataagctttatctgtcccctggaatatttcttctttctaaagccttctatgaagaatacagggaaataaaagttttctcagaaaactttctttctcaagcacagatggatgtagaaatctgtttactgagttgctttgcagtgtgtatgtggtggtctttttgtcagtgagccctttgttaacttagtatggctctgagagatggctcagtgggtaaagccttgctgctcaaacataaagacctttggctcctcagcatctctgtaaaatccaggtgcagctgcacactgtaatctccagtggtggggaggcagacagatcatcctagaatcaagctccacgttcagtggaagactctcttaaaaacaaaacaaaacaaaacaaaaaaacctagagagatggctcagaggctagaactagctgctctctaccagaggacccaggtcaaagtcctaacatcttcatggtgactataacgccagttccaagagacctgactttctcttctggcctgtgtcaccaacaggcatatatgtggtgcatggatgaacattgtgcacagacacatgcagacaaaacaaccatatacattaaaaaaattattttttttgaaggacagaggttgaatggtgatgcgtgcctgtattttcagcagataggtcagaagtttaaggtcatcatcaaattttaaggccagcctaggttagagaccctgtctcaaaatctcagtaatcagaagaaagagacagatggatcgctgtgaattcaggacagccagcagtcctaaaagagatccaatctcaatcaatcaatcaatcaaacaaacagattaataactacaaaaataaagtggagagtcatgttgatacaggagcacagaaagacatgcaaaccaggtgtgatttataagatgttttaattatgtttcagactaaagggtgacaattcccttaggaatacattattaactaaaacagtttggggtacaatgtttaccttttttgttagtcactaattaattcagggtggtcatgtaatgttagcttagtactggcttgggtcttaaatcagtgttgatgagaggtgagtgtgtttttactatggattttgggagtgtcaccctccctgctccccattttttcttctcaggagttgaagttacattgtgtaggctggtctgtaatccttggactcaagcagtactccttcccctgcctccagctggaactgcaggcacatacctaatatgcctggctgcagctcatttcttttgtaaaaagtgagttagtggaggtcagacaataactaagtagagctgatgctctgcacattttcgtgcatcctggaggctgagctctggggtcaccaggctttcagcatgtgtgtttaacttgcggagccatctcaccagccctcacgcttgcttctttaaatagttcctctcggggaacagtggttgttagataaagtgtgactgggaaagcacttggcattagataggttttgggcagtagctgagccttgccatgccctgatccccaggagaccatagaccatggctatgtgcctgtgccttgttatttggaacttccttgctttatggcaggtcatggatgacttagtattttgaagcccattttgagctaacatgctggctggaatgttggatctcttgacagtactttgtgtagcgctctaagggaatgcaggacctgcacaggcagtgccttccagaccccactattgttatttgagagtcaagatgagtacttttttttttgttgttgttgtttttcaagatagggtttctctatatagcctcaactcagaaatccgcctgcctctgcctcccaagtgctgggattaaaggcgtgcgccaccactgcctggcaagatgactactttttaccagaggctatgctccagtgtgagagaatgtgagtgtgggtggggcatggcgggggtagggggtgggggtgggttgtgggggaggataatgaattttggaatgaggatgtaagggagttgtttgttttttaaaatgtttgtggattcattcaccatgagctctactacttttttcttcattgtagaatactggtttaaagattctttttatgtctctatttttgccgtagagttaaagaaagaagatatttatgcagtggagatagttggtggtgccacacgaatccctgcagtgaaagagaagatcagcaagttttttggtaaagaactcagcacaacattaaatgcagatgaagctgtcactcgaggctgtgctctgcaggtgagtttggtcttcataggtcatagcacagatctacccattaacaaaagggcagcttaaggtgtaagtttctgaagcccttgcttaaaatgggcagctgacatacataaaaggtattgatggcgtagcgtgtagtgagaggagttcagaagtgcagaggctgggggctgtgctgacgcaggctttcagtttgattttagcacttgggaggtagaggcacatggagctcagtgaatttgaggtctgggctacagagtgagtccaggacacagagtgaggccagggctgcacagagaacattgtcctgcaaaaccacaaaacaaaacaaacaaacaaacggaattgtgggcctaggttaagggctaagctagagctgacagaacttgttggattgtcggtattgattcatgaagtagtagacttcagttaaagtaactagttagacagtaaatttgacaatgacagcagtttgtagaactattcagataccattatattactactgaaaatattaaatcaatgatggcctcctactgcttgtagttctataataccgggttataatgtctgtgtgtgtcaatggaattgttaacattttcgttctagtgtgcaattttatcacctgctttcaaagtcagagaattttctatcactgatgtggtaccatatccaatatctttgcgatggaattctccagctgaagaggggttaaggtaatatattatcagtcttgttgatacatactcagttgggtgttaaatctaggcagtgtgttatccttcttttcagtttacacgtgtatctgtccaaggcataaaatgtggttgttgttgatgtaaattcaaggccaggcatgatagtgaatccctgtaaccgagcatggttttggtagagggaggcaggaggatcaagaggtaaggtcatccttggctgcatagtgagtatgagcctctccttttttcctttttttttttttaaaggcatgagtaaattagtgccctgtccttttaaaattatatatacttgttcaagtatattattttttaaacagtccataaagaatttaagattgttgttttatttgtgtattttagctgcatgtatggctgtgtaccatgtgtctgcctagtatatgaggagaccagaaagagaacattagttgtaagataacatgtgggtgttgggaatcaaacccatgtcatttagaagagcatccagtgctcttaacttccgagtcatctctctatgaacctgcaaataacagctgacaaggaggagaaactaggactgttgagtaattacaaacctaggatacatgtgtcaaaggtgttcagaatgtcataaatttttgtctgaggaaagcgcttgccatacaagccagaagacctgggttcagaccctcagccaatgtaaagctagggtgagatgggaggtggagggtcagggctccccagaagcttccaggctgaaagcctggactgggtagcagcaaaaagcagagattgctgtctcagatcagggggagttcctcttacctcagcacacttgagacaccccccccccaaataacaaagaaagattggaatattttaaaaagaaaaagagccttatgaagttttgtgttttttgtccttttcttcttcctagtgactgtgaagtcttccccaaaaaccatgctgctcctttctccaaagtcctcaccttctacagaaaggaacctttcactcttgaggcctactatagttctcctcaggatttgccctatccagatcctgctataggtgagtagaattgaactgaaatcataacaaaaattgcctgtacttagagcactaaagggaaaaaaaatagactattcagaaatgtaggcgcttgaggccacaaaagcaaacatcttctgccctttgtacttgctgtagaggcagtcggatggttatttaatggaggcttgacttttgcagcagtgttcctgggttgagtgcacattgtgggtcattgcttaaggtgattctgatgtcagttggattctaatatagggttacaagatttgcacagaaaccactagattgtttacagcatcagtttattgttgattttggaaccaagttgaccagtctttacaaatagagaacatttacaatttggaaataatatcacttgacagagaaaccaagagttgtaaagatctgtgcagtggatgaacagccaggagcagtgtcagtgacctttgggaatggtgggaagaaggttggcctccctgcttttcatttgtatgacagtcatacccagaaaggcgaacttctcgaactgtattattttctatgccttccagtattggcctagccctgggaatgctcacttactcattgggcttccatagccttcctctgaaactcaccatggctttttgtcttaggcaactccaagatgtacagcttgcccgtctcaagtttttccatggttttgtttatttgtttttgtttttaaacaaaattgtttttgaactttaaaagataagaaaataaaattccacaacaaactcttggtatggtagtaaactttacaaatgaccatttcttggaaggtgacaaactggaaaaatttaaaagtaaattgtggaaattggatactttactatctggcacagcacatgcagctgacataggggattggaggaaaggagagaccaacaggagacgtttgagcccttagtgtggggggtcaggagtgcgctgtggtgagaggaaggagaggctacttctgagaaatgatctgacccaggagcctggttgttttattactacagctctggatgtttaaggtcagtctcactgtgcattccttccttaaatcccagctcagttctcagttcagaaagtcactccacagtctgatggctccagctcaaaagtgaaagtcaaggtccgggtgaacgtgcacggcatcttcagtgtgtccagtgcggccttggtggaggtgcacaagtctgaagagagtgaggagcccatggagacggatcagaatgcaaaggaagaggaggtagcctgcatgtgatagcatttgtattggtcacagctgacaggctgacgggagcactgaggccactcaaaccacttttacatttcattccagtggaaaggaactgaaattgactcctccctcagaccatttctcagcttagcactatacttctgattatgtctggtaatggtttttagaagtacaggagactatatactcttgataaatacaggtcttagtctgtctgtacatcagattcaaagctttgaacaccccaaaggcttggctcttccccatgtgtgcagagcacccacattgagatcttggtttcagatgcttcccagacttttttattttttgtttttttttttcttctgagacagggtttctctgtgtagccctggctggcctggaactcactctgtagaccaggctggcctccaactcagaaatccacctgcctctgcctcccaagtgctgggattaaaggcatgtgccactattgctcagccccagacttcatttgtttgtttgtttgtttttagatttatttatttgttatataagtacactgtagctgtcttcaaacactccggaagagggcgtcagatctcattatggatggttgtgagccaccatgtggttgctggaatttgaattgaggacttttggaagagcagtcagtgccatctctccaggctctcttcccccccccccccccacttctttattagtgaatggtgctgaaagaattctgtgggtctcttgacaaaaatcaagcctctgggaaaagcatgtggaagagaagctcaagttagtttgtttgtttccacactccattgagtcttttatgattcacaaaggagttccatagttcctacaaggatgggcatgtcgggcagggcaggtaccaaccacactgttgtgttgaactccagagaggaaaacttcatgctttgtgtaattgtgcgtaattggaattttgaaccctgatacagtgatggctggtaagtcaggaggcattctataccatgtgactttgagtatgttgtgaaggctgcctaggtttttttctgttggaatcttctggtttcaatgtttgatttaactggtctttcagaagatgcaagtggaccaggaagaaccacatactgaagagcagcagcagcagccacagacaccagcagaaaacaaggcggagtctgaggagatggaggtacaaccttaagattctcagtctctcaggaaccccagggcctgattggaatgtggttctgtgctgttctatttatttgtagaagttttaaactacattgcatagtgtgttttggaaagttaaaaagaacattaccgctaattttttactgatgaaacaatgagacataaaatttccttttgtatttctcaaattttgccaattgttttagtagtctgttttgttttttgtggggtgtttttttttttttttggttttttttttttttttggttttttgagacggggtttctctgtgtagccctggctgtcctggaactcactttgtagaccagactggcctccaactcagaaatctgcctgcctctgcctcccaagtgctaggattaaaggcgtcgccaccacaccggcacatctgttttttttttcttccctttttcccttttgctaaaagttttagtgaagaaaaattttgatggtttacttttcatgagtctgttctgacacgtttgtaaatttaagaatcttgttattcttatagtgataatcagcagcgcagggcaatgtaatatagtattctagttgagatttgtctttgtggtcacctttctgtatcttaggagtggaatggctaccaaccaagaacagtcacgaaggtggctagggaaccagaagagccactcctattgtaaggtgtaccatgtggctggggcgatgagtcagctggcaccaaggataagttctacacccaatgtacttgttgccaaccttgcctacttgagttggattcctcagacccagttggtggaaagaaaactgactccccacaaattgtcttctgaactccacccatatgtaccatggcatgtgtgtatgcatacatacaaagtcttaagaatgtaattttttttaagatttatttattattattattcattagtacactgtagctatcttcagatgcaccagaagagggtgtcagatctcattttgggtggttgtgagccaccatgtggtttctgggatttgaactcaggacctttggaagagcagtcaatgctcttaaccactgagccatctcgccagcccaagaatgtaatttttaaaaagaaagatgaagcagtgcatttgagtaggtacagagacgaggtgggtaggacacaggaacccaatccctaatgaccaccattatgcttaactcctgaatgtagtgttctacatataacagactcactctttagtttctagatatgatacgtatgagttacatcattagttaactaaggccaaatcagtttttgatatttgatctagtttaaaatattaagttagcctgtgtggttttgttcttcatagtttttgtttctttagacatctcaagctggatcaaaagataaaaagacggaccaaccacctcaagcaaagaaggcaaaagtgaagaccagcactgtggacctgcccattgagagccagctgctctggcagctggaccgggagatgctcggcctgtacacagagaatgaggtacgtttggactttaagtcagtgcttttaattcagttcctgatgttgtattgatctccaacagtaaactatttccttgctccttcattaactgtgattttgcttctgttaggaattggaatgtaaatatctgatatgcagggtgtctgatctgactcctgtaaaagggtttgatagtgctttagggtttctgccagtttggactattattggtaaaagcagatttaagttgtaagctatggctctttatgttcttttgtgtgtgatagtaacttgacgtctacattgctatctcttgtcaagtggctttttgttttgtttttgttttattttatttaagatagggtctctccttggctgacctagaactcactatgtaattcatgctggcctggccagagatctgtctgcctctgcctcccaagtgttgagattaaaggcgtgtgccactctgcctgacacagaactctgtcccccaaagtaataactaaccctttcccatgccccctccctttttttttttagtttgaaacaggccctccccccccacccctcaggagaccgggtttctctgtgtagccctggctgtcctggaactcactttgtaggctggcctcgaactcagaaatccacctgcctctgcctcccgagtgctgggattaaaggtgtgcaccaccactgcccggccaccacttcttgtcttaaatattttgtttttgcttttgagggtctttatttttattatctctccccaaaaaaccccctacaaaatctgtgcttttcaatttttttaattcctgggtctattttgtaggggtgactcaagaaatggaagcttgttgcttttaatgttagttgatgtgtaagaggaaattgtcatagttgtcctcgtgtttaattcattgttctgttccagggtaagatgatcatgcaggataaactggagaaggaacggaatgacgccaagaatgctgtggaagagtatgtgtatgagatgagagacaagcttagtggtgaatatgagaagtttgtgagtgaagatgtaagtgccctgctcccatactgatccggtctagggggaatccttggacactcaaaggaagctgtgttagtgtgcgtggtcatgttaccaagaaatgctgccgagacctgagtggtaggagcacagacaggctctttaaaggctggagttttggtcttagcactcatggtggctcattctgtctatagctatagagaattgacatccttttctgccctacatggacacttacatacattaggcaaaacattcatatgcatacaatccaaaaaatgtgaaaattttctgtttgggagttacatagttgtaactgttggaatagttgaatgtttagttttacatgtgtgaagggttcacatgcatgtgagtccatggagagcctcagaattcttgtctgctgtcttcctggattgttctccacttttactgtcaagacagtctttcttgaacctgcaattggctgaattttttttttttttaatttttttttaaactagtgtagctaggcaccccgttttagggattccccatctcttgcctcctgagtgctggattagaggagctgacacatctgtttggcttctacatgggctctgggtttcagaacacaagctcttatttatacttgcatggcaagcccatggttactcactgatccatcccctagacctggtttgcacttctgtattgtctcccattacagtgtgtgtgggttcgaaagtcagacacgtgattggtttttcttttttttttctttttggttttgttttgtttatttacaggatcgtaatacttttaccttaaaattagaggatactgaaaattggctgtatgaagatggagaagatcaaccaaagcaagtttatgtagacaaattggctgaattaaaagtaagtgtctcaacacagaggtatctgagcctctgtagtttccagagtggagcttccatgtaaaagcacaggctaaaactgcatgcaagaactgtatcactctgatgacctaacctgttattctcttaaccggttatagaatgagctaacttttgttccagtggattagcattgaggcccttcttggtgtcaggatatagaaagagcatggagttctagcctttcctcaggtacctgctgtgcagtttgggtcagggttgtgtatgtatataccttttcccatagtgtagctgaggctcgcctccagctcctcagcctccctccccggtgctgcatgtgcaggcttgccacatgcccagcaaagcctctgggtgtgagaaacatgctacggagctggatgggtaacatagaaaatattacctgtttgttgtttgaaaaaagttgtaaattcactgagaggaaatgggaactttccgttttgttatggcttttattgtggactttctggaagaactgggtcattgtagctgtccagagtatatggctcaagaacagtgcctggggcttagtttactttggcagggatgcaagtggtcctgctaaactatgttttcatttgtttggtttttgtttttaaaaagacagggtttctcttgttgttgtccaagttgttctagaactcagtatgtagaccatgctggtcttgaactcaagggatcccaccagcctttgcctcccaagtgatggaataaaaggcttgcaccactactgcctggcttcactgtgcaaaaaaaaaaaaaaaaattttttttttctggaaaatgccaggcaggcataagaaagttaagagtaattattgcagccattctggctgtgtgtcttttctgtaccttcttccagttgagttaagctttttgtgatttatgttttactcaaagtctacagccccatgctacaccatcattgcaccagagatctccagtgtgactgagttttccagttcttttttttttttttttttttttttttaagatttatttatatcctgggtgtggttgcttacgcctttaatcccagcactcgggaggcagaggcaggcagatttctgagttcgaggccagcctgatctacaaagtgagttccaggacagccagggctatacagagaaaccctgtcttgaaaaaacaaaaacacaaagaaacaaacaaaaaaaaagatttatttattatgtgtaagtacactgtagctgtcttcagacaccccagaagagggcgtcagatttcaatatggctgtgagccaccatgtggttgctgggatttaaactcaggaccttcagaagagcagtcagtgctcttaacctgaaccatctctccagccccagttcttatttcctgaacagtgacgaccatttagttgatcagagttgggacccaaataatgtacatatgcatagttcacctgtgtctgtagctgacttagtctcctccttttcctcgtctatgtgtgggagagatgggatcagttcattgtggagagttttctctgtgtgtgtgtgtgtgtgtgtgtgtgtgtgtgtgtgtgtgtttctgagccaacgtatgggtgtgggggcttgaacccaggttgctcttaactatggagccatctctccgacctccccagtttgtttcttaataaaaaaatgttggttaagtaaaaattgttggctaggtaacttttggttgtcctcccattgtgagaattgggcttggtcatgaggaacagcttcacttgggacagtcttgacttgtggtcacgagcagctggagaaggtgcctgggactttcagtggtttggacaaacatttagcttaaaatagcctgtattattttaagcatgtgttgtgtatatatatttgtatattcatgttcatcatgtgtgcgcatacacatacccagagagtgacaaattaaccccattactcttaatcctagtagttatataacttggatagtttaagctaccctgtataaacctgtgtattctcctgttagagtttaggtcaacccattaagacacggttccaggaatctgaagaaagaccaaaattatttgaagaactagggaagcaaatccaacagtatatgaaagtgatcagctctttcaaaaacaaggtatcttagtttcattttcgtatgatttttggttatggcactgtatgtttgtttgattttgtgtttttgaggcaagatctcactgtgtaggcctgggtggcctgggactagctatgtaggccaggtgtctttgaactcacagaagtccatatgcctgtgtatcctgagtgctggaattaaagccatgcgccaacacaaccagtcttagtttttctttttaaatcttactagttttattcttatgcacatagcaaagcattggatctttgttgggggctgaagttacagttggttttaagctgcccaatgaagataaagtgaactgaacttggattttgtacaagagcctttagctgccaaaccgtctctccagccccaagatgagaaatgtttgagaggagatactgggtagggagttgctcatcttccaattaactgtcatctccacttgtaggaggaccagtatgaacacttggatgctgctgacgtgacaaaggtagagaaaagcaccaatgaggcgatggagtggatgaatagcaagcttaacctgcagaacaaacagagcctgacggtggatccagttgtcaagacaaaggagattgaagctaaaattaaggtagttcttgcccttgtgtactctctctcctcccccccccctctttttcttccttccttccttccttccttccttccttccttccttcctccctccctccctccctccctctctccctctctctctctctctctctctctctctctctctctctctttctttcttttttttttttttgagacagggtttctctgtatagccctggctctcctagaactcactctgtagaccaggctggccttgaactcagaaatccatctgcctctgtctctctgcctctgcctgaattaaaggcgtgtgccaccatgccgggccctggacatttcttagcagctctttgttattaacagttgggatttcattatggcttaggtattggggtttacttagcatgtcatataaaatttgtttcatttataagaaactatagttttctttaccattctaggagctgacaagtatttgcagtcctataatttcaaaacccaaacccaaagtggaacccccaaaggaggaaccaaaacatgctgagcagaatggaccagtggatggccaaggagacaacccaggctcccaggctgctgagcacggtgcagacacagctgtgccttctgatggcgacaagaagcttcctgagatggacattgattgattccaacacttgtttatattaaaacagactattataaagctttaagttgtcaactttgttctgaatatcaactagagcaagcaaatactggagatttcttagtcagtttttaggggacctcgggggtggggtatataggtaatatacagagcattttgacttctaaatagttagatccagagatgaagtgcactgttctctcttcattacggtcctgtttaagagcccagctagtctatctgagctctcgcctccatccttgttttaatcatgcttctacaaggtgaagtgtgtttggggaaactgagctctaacaaaagccgcgacagccaccaggcaggcttttccttatacatgacagaagttcgtattacgccttggaaggtctaggtggagatcaccaccagcattctctgcctgtggggttgtggggctggtgctttctccatttctgagggtcaggatggccaagcatggattaacactaggagagtgcagagcgcagcagagcctgctctcatccctctatccccagcccagtcttcctcctccatccttaagcagtataaatgctatgtgccctcttcacttagagcgagctttagtgtgtcaagggactctgctttcctgtacttcctaaaagtacattcactaatactgaagcatcaaagtgtagtttaaccttaaggttgggttgtaaataacacagttgggtgtaggcatggtaaatctgagcagtccatccttagtatggtggaaagatttgtaccctgacccgctcgagtggtggtagatgtatgtaaattagaagtttgaatgggacaggatgagagttcgaggctctttgtttggtatcttttgtgttaatgtgtcttgaatctgccaatctgtatgttaaaacagctgacagattgtaaagctattgcactgcgttgccctggacaagtctgaaattggtataaaagacaaggtgcccaaggtcacaagaacacctcattgccgactgaagccagtgtcagggcaccacatactcctggggccagtctacaggaaagagatgttctgcaaacaagggtggatgcctgcagtagaggtcagagctggttacctgccttagttacaagtgtcggttatgttctgggtctttgtaatcgctgatctctgtaacagagcctctgtttatttttgcttgttggaaatagggttcaaccatgcatagttagaatcactatgcatctgtctgtccacacaggaagtgctatagctctcaagtgctctagaggcagttggaaaggaaggaatgcatgcttatgtgagcagctggactcccgctcagtacaggcctggaaccccaggccaaatgtatgctctgcttccttgagtgctgtaagagttcccactggccttgctctgaggccaagagctttttcaaatgcaggctgcaggattaagccagctcttatgcaactgactgtccttaatgaagaactcataaacatttgtgtgtgggggtgggggtgggagggtttgggtgctgggatgggggtgaatttgaagtttaagattaaaagctagaaatcagatggtctgcttctgctatgtctgtagaccgattggatgtatgtggaggctggccagatggcaactgatgacttgtgtgcaaacaagtgtttatccgggttgcattatccaaactggtttgttaaaaactctaggtcacattcttacactaagaaaaacagttaacatgagacaaagtttaggaaaaactaataaaagaaacctgtcttaacttgaatggttttcttaattttcttaagtgggctgtttgtgtgtgtgtgtgtgtgtgtgtgtgtgtgtgtgtgtaggggacttacttgagtagttatatatgtgggtgggtgggtaggggcaggctgggggagactgtcaacagaataagctggcctgaatgcagtccatcatcctgccttagctgcttgcctgtgtgcttattttggagccctctgcccctgagaatagcaatccagtgttcttggtatagtaatcttctgcgaggctggcctttagatttgatggtagaaggtagatggcacagagtattaacataagtgccaggactgagtagggccagaatctgctaggaactgatgcctggctagttggggacatgccctgtggtgaggcaatagggttgaagtagtgagccctttactgccatggcatgggtcctatgtagggagaagtcagacgctggttggttgaaactcacctttatggaccatgctggcctcagattcagatctgcttgctgctgcctccccagggtgggattaaaggtatgtattgccacacccagcctcaggtcatgccttgggctatgctttttggagaggttggggtgggcctggccatagctgttctacggcatcgggtggcatggtcagcagtgcccctgcgtggggctgtggggactgtgagggtgggagtaaagcaatgactgatgtcaaattgtccactgcggtcactttgctctgtgtgtgtgtgtgtgtgtgtgtgtgtgtgtgtgtgtgtgtgtgtgtgtgtgtgtgtgtgtgtgtgtgtgtgtgtgtgtgtgtaaaaccctgtcagaatctggaggcatgaagaaccaggtgacttgtgtaaggaaagtggtagaaagggcctgggtgactacttagatctgtttaccagtggctgagttttacaaggagccaagatgtacctgaaggagggggaaggatttcagtgtggctccagcttatgcctatggtgaaaaactggcagttgcttttaggggaataagtgacaaggcaagaagtggcaggttagaagtctggttgacttttcattgtctcattgctgaagatgaaacctaaggctcacacatagcaggcaagtgctctactgtaagccacattttatcctcaagctcatctcccttccctgcctgtctcccgagtggctgggattaaagccacaatgcttgacctaaaattgttttaaacagaatggcatgggagacagaggcagatggatctcaagaccactctggtctgtgcagtgagtttcaggtcagccaagggcacagtgataaccttgtctcggcaaaacaagcaaaaacaaaagtgaagagaaagaccctgagctggagttacagcttagttggagccagcatgatggtgcatgtctgtaatcgcagcgctcatggagtagagagtggaaggatggaggatcacagttcaggatctgcctatgtgtgtgtgagtttgaggctggtctgcactacagtgggatgctccagaataagtaagcaatggataaatgactttaaggccttaattctaaaatagatgtggaactttaggtctgttggggtcatggtaggtcagctgctggttgtaaaggttgtagaggatagagaaaactgttgtagttccaggtagctgtggaaggaatcctcagggctggggctgtcctggatatatttagaagtgtccagaaaggaagtagaaccttctagaacagaaggttgggaagagggagttcaaccatgagaaatggaatggctagtaggtctagatgcttcaggagtgttccagaaggtgggagctggttgagcccctaaggagcttgggttcagagaacccacgagttcccaggcactctcagcctgctggaaacgggatcagttggcaggctgggcggtgtcctgtgcccatggtctagaattaaatgaggatggttctcaccactcttcttcactcatggtttgccagtacatttcttggatggctctggctggggacaagcccaggacatgaccctcacagacctgaaacacaactgcccttgtgcactggatgctgctgtttgaagcagaggctgctgtaagaactgtaagaaggaggggtgtgcggaatctgaggccagcatggtccataaaggtaagtttcaaccaaccagcgtctgacttctccctacataggacccatgccatggcagtaaagggctcactacttcaaccctattgcctcaccacagggcatgtatccactagccaggcatcagcccaggaagcaagacagaaagcaggaaggtgtgcttttctgggggatcagggaaagaagggacctaggcaatgttaacaatacagacatgcttcccagatctgtgcaatacccaagggcaatcacgggctggccataaccttgctgtccagttctggcgcatgcattcaggaagagagaatagagggatatttgcttccagttactcagtgggatttgcaaaattcaagtccaacactcagagtcagacactatagaaagctgtatttgtcttgggccctttcatgagctgtgcagagacttaaatccatacagggctgggtgcctgttaaaaatttggagtcctggatcaatggaggaagagagagcagcacgactgcttttcttatctccagttagcaggcttttttccaccactgctgcaggactcacattgttctgctttgttttctacctgaactaaaaaacttactttaaaattgggattggaaagacagctcagcagttaagagtgcttgctgatcttgcagaggactgagttcagctctcagtgctcataatgggccgtctgtaattccagctccagagaattggaaacctctggtctctgcaggcaactgcatttgcttgcacatacacacacacttaaaaatgataaatcttaaaacccctccttatactttaaagcaatatcagcctactatttgtttggctagtgcttgcagaggggaagctgtggctcagctcccaggacaaacactagtcagatatttgcagggtgagctggatcagaaggcgtatccagctcaagggcatctgttagctattccagtggaaggagtattactgtgtattacttttattgttgttgttgttgttgttgctcatacaagtacctaacaaaagcaatacaattaaggaaggactttgatggctcacagtttgagggcacaagtccatcctggtgcgggtggggtgatgagagcatgcaggaagcagagctgagtcatgggtcaccccactctgccccctttccgttcagttcagggccctggcccatggcatggttctgcttgctctggggcaggtcttccctcttgagttaaacctcagggaaatattttcacaggtacatattggtgtgcctcctagggggttctaaattccgttaggttgataatcaagagtagctttcacaggaggttttatagtatctgaaacatcaagaggcccatgcagtggtctggaaaggcccttgcttgagtgatgggccttgcctctgtgcctggtctctcaatgaagcagcgactggagtccaggtgcctctccgtgactaaagagatgcggtattttcaatggcgacaagaatagccaccagtgctctgggactcactccacaactcccctttctggatggggaaagggtcaaagctggtgctcgttataagctcagtagcatagctgacttctggagagccacgtgtctgccatagtggatgaggactttcaaaaagccaccctcaacatggtgttaccatagtcgcttcaaatctgtggggaaacccacctaagacccttcgaacctgtggtggtgctaaatcctatgtatattagattttctcctatacgtacctttgataaaattcagtgcataagttagggagggtaaatcagatgtgatttcacatgcctatagtctcagctataggcagactgaagggcaggggatcaggcattcaaggtcacggtagttccttagtaagttctaggccagcctggaatctatacggctttatttcagggggaaagaaagggcggtaagagatgaacagtactgagagaatgttgagatgttctgtcttgtatataatagacactataggctgtactatatagtgtactagtatgctgtatattagtggagtacagagcacacaaggctgggcaaagggatgggtggtatcctaggaagaattgagccatataacatgaggtttctgcacactattgagggtagtatgtaatttaaaattcacgagttatttctggaaatttccacttaatgccttcagatcatggctaactgtagggaactaaaacaggaagtcaaggccgtggatgaaggggcctactggttttgaagtagctctcatttcttttgtaaagctttattccatctatttattttgtgtgtgcactgcacacttgtgagggccagatacacgttttaggagtcagttctctccttccaccatgtaaggtgtagaaattgaacccaggtcctcagatttggggcaggtccgctcgtcatctcaccaaacccagttctcatttcttaagtttcttctccagccagctctggtcttctgcgagctgcaatgccaatgctgccacatgggggcgccatcgttctttctttgttatggtaggttgttgccaagcaggtcagaatcagcacaccattcagacttcaggtttggagaaatttggagaagagaaggtggctcctccatctttgggttagtgaagtaaagccaaatcagtctggttccacacaacagctagacgtgagagtgttagtcactaatctgttgtgttgtgatgtttcatcctcaccgtcaacctgacggcttagaatcacctaggagacacacctcagagtgcctgtgaaattgttatcagagatgttcacctagagaaggaagagctcccctaaatgtgggtggcaccaccccatgggtctggagtgaattaaaaaaccagcaagttgaaggctggagagatggctcagcagttaagagccctggctgttctttcctgaggatctgggttccagtcctagctcccacacagtggctcacagccatctgtagttccagtttcaagggatccagtgccctcttctggcctctgtgggcactgcacacatgtcatgtagacatagacaggcaaaaacacccacatacataaaaataataaagacatgttaaaaaaatggaaaaatgcagatcgtggagactggggagtgtggttcagttggttaaaatgctcgctgtgcaaggacgaggagctgagttcaatctgcagaacctgtgtaaaaagccagatgtggcggtgaacacctatatcttagtgctgtggtggcagaggcagcagatcctggggcttgttgcccagcagcctagcccatttgccacgccctgggcctcagagagagaatgtgagttgaaaaccaaggaggatacctcctcaggaaaaaatagtacccaaggttgacctgtggcttccacgtatgcatgcaattccccaccaggatgggcagcgcccttaaccaaaccaacccttccttccagaagttgcttctgtcaagtacttggatgcaagtaactaagacacacctagagatctgaccactaaagtgtggtgttactgggtaataacgaagactcttgcactgatgttaacctggggtagacactagggtaaacactgaagagtcatgggatagacagacactggggtggacagacactggagtgggtagacagacactggggtgggtggacagacactggggtgggtagacagacactagggtggacagacactggtgtggacagacactggggtagtcagacactgggatagacagacactggggtggacagacactggggtgggtagacagacactagggtggacagacactggggtggacagacactggagtgggtagacagacactggggtgggtagacagacactggggtggacagacactagggtgggtagacagacactgggatagacagacactggggtagacagacactggagtgggtagacagacagcaagcagcatatacagacaccaatataccagggttgacagagactggcatagacatttatgctacctggaatcagcctgaaaccctcccctgtctcagcaggtcccaggcagtcccgagcttccacagcttcaggagaaccttccttcctgtctctagcaagccagggtaagtcctgagagggcccagcaactgcagaaccctccccctgggagaagtggctgttagcctctgggctggagttgagctactttctgttccttctgtgacacaggactctatcccagggcttcacgtgcactagctaagaacctttaccaactgaggtacaggctagccattttatttattttgagactgggtctcatgtaacccaggctggcttcaaacttgaactcagatccactagaggactttgaactcaatctgcctctatgtcctaagtgttgggatcctagttatgcactactctgcccagtttatgttgtgctggggactgaacccacggcttcatcattgctgggttagcagccctaccacctgaactacctttgccgccccagttgtcctttctaaccgagcctgtcgtctccagcgttctgactcaggtacatacatagtaagccatccctccctcaaactagagaatggctctctggcatgagggatcctggctgctcaggggctgttcctgggtcagctggccacgccacaccatttccattagttcagatccagcttcagcctgctctatacagctttcacagatgctttcgaaaggagccctaaatcagagccaactcatcaagtggctctgactattaacaaaattgcttcctgctaatttgagtttacaaaataaatggctcctgacaatctggcagggctgcgtggcgggcaccccacccaccatgtgctttgggtacaggacagggcatccacaggggaacaggggagctctggcccaaatgccatggcaaccgtcagagaggacttggggctatcacagatagataggctgaattatttgctgggtttgttcatcactccgaggagtctgggatgctgcactggcctagcaacatggttactacagggcctgcagctgctattatgcagctctttgtctagctgggcctgcaaataagtggataatgaacagtcatcaggcagagagggacagtgcggcccagacagctgagcctggagctgagagaggcacaatggaaagagagggctgggggacagcttgaccccaggcatgcagggagcaaggggcagcactgtggggtagaaaagaatccagggcagaggtcagtcaggtcagatactggcaagagcttgaagttcagagccataaaaaccttgtccagtgggaagatggcttaggtggtaaagtgcttgtcacatacgcatgaagaccagagttcaatccccacccagcatctattttaaaaactgcctgtcttggtgatatatgctcctaatcccggtgctgagaaggtggagatattcatcccctgggccttgatggctgaatcagttgtgctccaggcatgattctccaaaacaagtgggtgcctcctgtggtagccccccaaaggggtagcattattaggaggtgtggccttgttggagtaggtgtggccttgttggaggaagtgtgtcactgtaggaggcgggctttgaagtcttatataagttcaagtctcatgcagtgagacagtctccttttgctgtctggccccagctccatgtctacctgcacaccaccatgcttcctgttacaatggactaagcctctgaaactgtaagccagtcccagttaaaggttgtcctttataagagttgccacgatcatggcgtctcttcacagcaatgaaaccccaactgagacacctcctgagggagggaggccacctgagggtgacctctgacctccacgtgccctctctacccagtctgagacagggtcatccccactgttcactccagtgcaagcattacctggcccttgcgtttccatcttgccacaggaatgctgggaggagagaggaccatgtccagcttttctgtggggtctggggatctgaactcatgcctttatacgtgcacggtaagccctttgcgcacggagccacctctctagcctttatagtttgcttctacaaagtctcatatagccaaggctgtccttgaactcttgatattcctgcctcagcctccccagtgctgtgatacctgaatttgggttctggaaggctggcgagggggtggcagtctgatggcatgtggtggtctgatggcatgtgccacacaaagtataaagtgtaaaggcagcaactggtgactcccttttcctccatgccaggactggggtctttagaatgatcccgagtggcccgtcctctgatgcaccttgaaccagggactggaagtgtgtttttctgcatggtgcgatgggtaattaccagcacaccaacactgaaacgcagccttggctcgaggaacgaacacaaaatggcaagagcagagtttccgtcgtagacctcccgcacttaacatttatgagtgcccataaaaggcaaggttggaattgtatctgcagttcccaagcacacgccatcattttacacactctaacatctgttttaagatcacagcagagagtgttgggtaattggcttccttttgtcctgggcccatcggttaggccccatcaactcgattataaattctcagggatttaccagtaaacagcatttggggagcccgatactgtcattctgcagctcgggttcgcaaagaggctaagagtgggtttattggtgcttccctgcgcagccgcagggccacagctgcagcctgagacacaggctctgctgggaagccccagacccagggtgaggtggtagcaaaaaagaaaagcttctgtgttctgtgcctcagtttcctcctgtgtaaaatgcagctggtgatggttgtcctaattccctaggggcaacttgaagccagggcacagagcatgtttagcattgtctggctatcatggagagactcctacagggggacactgctcctagggaagcaaagagacaaagacaagctcttcagatggccgttcataggggcacagggcaggggtcctagaggcatagatggctgaccgaaggttccaaaggtctccttcctggaggcagctgtgagggcgggccacactgtgagataagatgcagagatccatagcaaggcctagtaaaggcggggagccgggatgggggttggtggggggtgtgtgtggccatgacaggcatttctcctggactggggcgctggcatccttcttgtgttcatgagctgggtagtcccagtagaaggggatagcaggaacccaacaggtcttccggcccaggctctggaagaaggaacaatgttctgagctttctctttgggtctagtgaccttagttcagcccgtctggtttcttgctggccagggccagctttcctcatagggtctggaagttccagcctggcccctctgggagggcttttctagagaggggtaatgaatgggttcccagagagcagacagactgcagtaagatagtccctggggcccagccctggagtctgacacaaattttccagacctaagcgtcccagcttggagccataggtgataaccaagtctagcgaaaactaacccaggcaggcagcggctgtcaggcagagctctgcacctggcacttacccctgcaggatctagggagtactgtggagctgtctgctcttttgttaagtaagaccagaagttggcattcagctctactg

SEQ ID NO: 1412 - DNA, 1604 bp, Mus musculus
gagccgcggcccgagcggtagaggcccccgtctttctccaagccccaagcctcctagcggacggtcgtccggcttcgcccgcccagccgcggcgctccaccggcccacgcggctcgccctcttccacgcgccaaccccgccgggttccgtgtgcagtgtcggcggccggccctgggcccgagccggagcagtagccggcgccatgtcggtggtgggcatagacctgggctttcagagctgctatgtcgctgtggcccgcgccggcggcatcgagacgatcgctaacgagtatagcgaccgctgcacgccggcatgtgtttcttttggtcctaagaatcgttcaattggagcagcagctaagagccaggtaatttctaatgccaagaacacagttcaaggctttaaaagattccatgggcgtgcattctccgatccatttgtggaagcagaaaaatctaatcttgcatatgatattgtgcagttgcccactggattaacgggcataaaggttacatatatggaagaagagaggaattttaccacggaacaagtgactgccatgcttttgtcgaaactgaaggagacagcagagagtgttcttaagaagcctgtggtagactgtgttgtctcggttcctagtttctacactgatgcagaacggcggtcagtgatggatgccacacagattgctggtctcaattgtttgcggttaatgaatgaaacaactgcagttgctcttgcttatggaatctataaacaagaccttcctgccttagaagaaaaaccaagaaatgtagtttttgtagatatgggacattctgcctatcaagtttctgtatgtgcatttaataaaggaaaactgaaagttttggccacagcttttgatacaacattgggaggcagaaaatttgatgaggtgttggtaaatcacttctgtgaagaatttggaaagaaatacaagctagacataaaatctaaaattcgtgctttattacgactgtctcaagagtgtgagaaactcaagaaattgatgagtgcgaatgcttcagacctccctttgagcattgagtgttttatgaatgatattgatgtgtccggaactatgaatagaggcaaatttttggagatgtgtgatgatctcctagcaagagtggagccgccacttcgaagcgtcttggagcaatccagtgagaagaaccacatactgaagagcagcagcagcagccacagacaccagcagaaaacaaggcggagtctgaggagatggagacatctcaagctggatcaaaagataaaaagacggaccaaccacctcaagcaaagaaggcaaaagtgaagaccagcactgtggacctgcccattgagagccagctgctctggcagctggaccgggagatgctcggcctgtacacagagaatgagggtaagatgatcatgcaggataaactggagaaggaacggaatgacatggcaactgatgacttgtgtgcaaacaagtgtttatccgggttgcattatccaaactggtttgttaaaaactctaggtcacattcttacactaagaaaaacagttaacatgagacaaagtttaggaaaaactaata

SEQ ID NO: 1413 - protein, 373 aa, Mus musculus
MSVVGIDLGFQSCYVAVARAGGIETIANEYSDRCTPACVSFGPKNRSIGAAAKSQVISNAKNTVQGFKRFHGRAFSDPFVEAEKSNLAYDIVQLPTGLTGIKVTYMEEERNFTTEQVTAMLLSKLKETAESVLKKPVVDCVVSVPSFYTDAERRSVMDATQIAQCLRLMNETTAVAYGIYKQDLPALEEKPRNVVFVDMGHSAYQVSVCAFNKGKLKVLATAFDTTLGGRKFDEVLVNHFCEEFGKKYKLDIKSKIRALLRLSQECEKLKKLMSANASDLPLSIECFMNDIDVSGTMNRGKFLEMCDDLLARVEPPLRSVLEQSSEKNHILKSSSSSHRHQQKTRRSLRRWRHLKLDQKIKRRTNHLKQRRQK

SEQ ID NO: 1414 - DNA, 3925 bp, Mus musculus
gagccggagccgcggcccgagcggtagaggcccccgtctttctccaagccccaagcctcctagcggacggtcgtccggcttcgcccgcccagccgcggcgctccaccggcccacgcggctcgccctcttccacgcgccaaccccgccgggttccgtgtgcagtgtcggcggccggccctgggcccgagccggagcagtagccggcgccatgtcggtggtgggcatagacctgggctttcagagctgctatgtcgctgtggcccgcgccggcggcatcgagacgatcgctaacgagtatagcgaccgctgcacgccggcatgtgtttcttttggtcctaagaatcgttcaattggagcagcagctaagagccaggtaatttctaatgccaagaacacagttcaaggctttaaaagattccatgggcgtgcattctccgatccatttgtggaagcagaaaaatctaatcttgcatatgatattgtgcagttgcccactggattaacgggcataaaggttacatatatggaagaagagaggaattttaccacggaacaagtgactgccatgcttttgtcgaaactgaaggagacagcagagagtgttcttaagaagcctgtggtagactgtgttgtctcggttcctagtttctacactgatgcagaacggcggtcagtgatggatgccacacagattgctggtctcaattgtttgcggttaatgaatgaaacaactgcagttgctcttgcttatggaatctataaacaagaccttcctgccttagaagaaaaaccaagaaatgtagtttttgtagatatgggacattctgcctatcaagtttctgtatgtgcatttaataaaggaaaactgaaagttttggccacagcttttgatacaacattgggaggcagaaaatttgatgaggtgttggtaaatcacttctgtgaagaatttggaaagaaatacaagctagacataaaatctaaaattcgtgctttattacgactgtctcaagagtgtgagaaactcaagaaattgatgagtgcgaatgcttcagacctccctttgagcattgagtgttttatgaatgatattgatgtgtccggaactatgaatagaggcaaatttttggagatgtgtgatgatctcctagcaagagtggagccgccacttcgaagcgtcttggagcaatccaagttaaagaaagaagatatttatgcagtggagatagttggtggtgccacacgaatccctgcagtgaaagagaagatcagcaagttttttggtaaagaactcagcacaacattaaatgcagatgaagctgtcactcgaggctgtgctctgcagtgtgcaattttatcacctgctttcaaagtcagagaattttctatcactgatgtggtaccatatccaatatctttgcgatggaattctccagctgaagaggggttaagtgactgtgaagtcttccccaaaaaccatgctgctcctttctccaaagtcctcaccttctacagaaaggaacctttcactcttgaggcctactatagttctcctcaggatttgccctatccagatcctgctatagctcagttctcagttcagaaagtcactccacagtctgatggctccagctcaaaagtgaaagtcaaggtccgggtgaacgtgcacggcatcttcagtgtgtccagtgcggccttggtggaggtgcacaagtctgaagagagtgaggagcccatggagacggatcagaatgcaaaggaagaggagaagatgcaagtggaccaggaagaaccacatactgaagagcagcagcagcagccacagacaccagcagaaaacaaggcggagtctgaggagatggagacatctcaagctggatcaaaagataaaaagacggaccaaccacctcaagcaaagaaggcaaaagtgaagaccagcactgtggacctgcccattgagagccagctgctctggcagctggaccgggagatgctcggcctgtacacagagaatgagggtaagatgatcatgcaggataaactggagaaggaacggaatgacgccaagaatgctgtggaagagtatgtgtatgagatgagagacaagcttagtggtgaatatgagaagtttgtgagtgaagatgatcgtaatacttttaccttaaaattagaggatactgaaaattggctgtatgaagatggagaagatcaaccaaagcaagtttatgtagacaaattggctgaattaaaaagtttaggtcaacccattaagacacggttccaggaatctgaagaaagaccaaaattatttgaagaactagggaagcaaatccaacagtatatgaaagtgatcagctctttcaaaaacaaggaggaccagtatgaacacttggatgctgctgacgtgacaaaggtagagaaaagcaccaatgaggcgatggagtggatgaatagcaagcttaacctgcagaacaaacagagcctgacggtggatccagttgtcaagacaaaggagattgaagctaaaattaaggagctgacaagtatttgcagtcctataatttcaaaacccaaacccaaagtggaacccccaaaggaggaaccaaaacatgctgagcagaatggaccagtggatggccaaggagacaacccaggctcccaggctgctgagcacggtgcagacacagctgtgccttctgatggcgacaagaagcttcctgagatggacattgattgattccaacacttgtttatattaaaacagactattataaagctttaagttgtcaactttgttctgaatatcaactagagcaagcaaatactggagatttcttagtcagtttttaggggacctcgggggtggggtatataggtaatatacagagcattttgacttctaaatagttagatccagagatgaagtgcactgttctctcttcattacggtcctgtttaagagcccagctagtctatctgagctctcgcctccatccttgttttaatcatgcttctacaaggtgaagtgtgtttggggaaactgagctctaacaaaagccgcgacagccaccaggcaggcttttccttatacatgacagaagttcgtattacgccttggaaggtctaggtggagatcaccaccagcattctctgcctgtggggttgtggggctggtgctttctccatttctgagggtcaggatggccaagcatggattaacactaggagagtgcagagcgcagcagagcctgctctcatccctctatccccagcccagtcttcctcctccatccttaagcagtataaatgctatgtgccctcttcacttagagcgagctttagtgtgtcaagggactctgctttcctgtacttcctaaaagtacattcactaatactgaagcatcaaagtgtagtttaaccttaaggttgggttgtaaataacacagttgggtgtaggcatggtaaatctgagcagtccatccttagtatggtggaaagatttgtaccctgacccgctcgagtggtggtagatgtatgtaaattagaagtttgaatgggacaggatgagagttcgaggctctttgtttggtatcttttgtgttaatgtgtcttgaatctgccaatctgtatgttaaaacagctgacagattgtaaagctattgcactgcgttgccctggacaagtctgaaattggtataaaagacaaggtgcccaaggtcacaagaacacctcattgccgactgaagccagtgtcagggcaccacatactcctggggccagtctacaggaaagagatgttctgcaaacaagggtggatgcctgcagtagaggtcagagctggttacctgccttagttacaagtgtcggttatgttctgggtctttgtaatcgctgatctctgtaacagagcctctgtttatttttg

SEQ ID NO: 1415 - protein, 832 aa, Mus musculus
MSVVGIDLGFQSCYVAVARAGGIETIANEYSDRCTPACVSFGPKNRSIGAAAKSQVISNAKNTVQGFKRFHGRAFSDPFVEAEKSNLAYDIVQLPTGLTGIKVTYMEEERNFTTEQVTAMLLSKLKETAESVLKKPVVDCVVSVPSFYTDAERRSVMDATQIAQCLRLMNETTAVAYGIYKQDLPALEEKPRNVVFVDMGHSAYQVSVCAFNKGKLKVLATAFDTTLGGRKFDEVLVNHFCEEFGKKYKLDIKSKIRALLRLSQECEKLKKLMSANASDLPLSIECFMNDIDVSGTMNRGKFLEMCDDLLARVEPPLRSVLEQSKLKKEDIYAVEIVGGATRIPAVKEKISKFFGKELSTTLNADEAVTRGCALQCAILSPAFKVREFSITDVVPYPISLRWNSPAEEGLSDCEVFPKNHAAPFSKVLTFYRKEPFTLEAYYSSPQDLPYPDPAIAQFSVQKVTPQSDGSSSKVKVKVRVNVHGIFSVSSAALVEVHKSEESEEPMDQNAKEEEKMQVDQEEPHTEEQQQQPQTPAENKAESEEMSQAGSKDKKTDQPPQAKKAKVKTSTVDLPIESQLLWQLDREMLGTENEGKMIMQDKLEKERNDAKNAVEEYVYEMRDKLSGEYEKFVSEDDRNTFTLKLEDTENWLYEDGEDQPKQVYVDKLAELKSLGQPIKTRFQESEERPKLFEELGKQIQQYMKVISSFKNKEDQYEHLDAADVTKVEKSTNEAMEWMNSKLNLQNKQSLTVDPVVKTKEIEAKIKELTSICSPIISKPKPKVEPPKEEPKHAEQNGPVDGQGDNPGSQAAEHGADTAVPSDGDKKLPEMDID

SEQ ID NO: 1416 - DNA, 3811 bp, Mus musculus
gagccgcggcccgagcggtagaggcccccgtctttctccaagccccaagcctcctagcggacggtcgtccggcttcgcccgcccagccgcggcgctccaccggcccacgcggctcgccctcttccacgcgccaaccccgccgggttccgtgtgcagtgtcggcggccggccctgggcccgagccggagcagtagccggcgccatgtcggtggtgggcatagacctgggctttcagagctgctatgtcgctgtggcccgcgccggcggcatcgagacgatcgctaacgagtatagcgaccgctgcacgccggcatgtgtttcttttggtcctaagaatcgttcaattggagcagcagctaagagccaggtaatttctaatgccaagaacacagttcaaggctttaaaagattccatgggcgtgcattctccgatccatttgtggaagcagaaaaatctaatcttgcatatgatattgtgcagttgcccactggattaacgggcataaaggttacatatatggaagaagagaggaattttaccacggaacaagtgactgccatgcttttgtcgaaactgaaggagacagcagagagtgttcttaagaagcctgtggtagactgtgttgtctcggttcctagtttctacactgatgcagaacggcggtcagtgatggatgccacacagattgctggtctcaattgtttgcggttaatgaatgaaacaactgcagttgctcttgcttatggaatctataaacaagaccttcctgccttagaagaaaaaccaagaaatgtagtttttgtagatatgggacattctgcctatcaagtttctgtatgtgcatttaataaaggaaaactgaaagttttggccacagcttttgatacaacattgggaggcagaaaatttgatgaggtgttggtaaatcacttctgtgaagaatttggaaagaaatacaagctagacataaaatctaaaattcgtgctttattacgactgtctcaagagtgtgagaaactcaagaaattgatgagtgcgaatgcttcagacctccctttgagcattgagtgttttatgaatgatattgatgtgtccggaactatgaatagaggcaaatttttggagatgtgtgatgatctcctagcaagagtggagccgccacttcgaagcgtcttggagcaatccaagttaaagaaagaagatatttatgcagtggagatagttggtggtgccacacgaatccctgcagtgaaagagaagatcagcaagttttttggtaaagaactcagcacaacattaaatgcagatgaagctgtcactcgaggctgtgctctgcagtgtgcaattttatcacctgctttcaaagtcagagaattttctatcactgatgtggtaccatatccaatatctttgcgatggaattctccagctgaagaggggttaagtgactgtgaagtcttccccaaaaaccatgctgctcctttctccaaagtcctcaccttctacagaaaggaacctttcactcttgaggcctactatagttctcctcaggatttgccctatccagatcctgctatagctcagttctcagttcagaaagtcactccacagtctgatggctccagctcaaaagtgaaagtcaaggtccgggtgaacgtgcacggcatcttcagtgtgtccagtgcggccttggtggaggtgcacaagtctgaagagagtgaggagcccatggagacggatcagaatgcaaaggaagaggagaagatgcaagtggaccaggaagaaccacatactgaagagcagcagcagcagccacagacaccagcagaaaacaaggcggagtctgaggagatggagacatctcaagctggatcaaaagataaaaagacggaccaaccacctcaagcaaagaaggcaaaagtgaagaccagcactgtggacctgcccattgagagccagctgctctggcagctggaccgggagatgctcggcctgtacacagagaatgagggtaagatgatcatgcaggataaactggagaaggaacggaatgacgccaagaatgctgtggaagagtatgtgtatgagatgagagacaagcttagtggtgaatatgagaagtttgtgagtgaagatagtttaggtcaacccattaagacacggttccaggaatctgaagaaagaccaaaattatttgaagaactagggaagcaaatccaacagtatatgaaagtgatcagctctttcaaaaacaaggaggaccagtatgaacacttggatgctgctgacgtgacaaaggtagagaaaagcaccaatgaggcgatggagtggatgaatagcaagcttaacctgcagaacaaacagagcctgacggtggatccagttgtcaagacaaaggagattgaagctaaaattaaggagctgacaagtatttgcagtcctataatttcaaaacccaaacccaaagtggaacccccaaaggaggaaccaaaacatgctgagcagaatggaccagtggatggccaaggagacaacccaggctcccaggctgctgagcacggtgcagacacagctgtgccttctgatggcgacaagaagcttcctgagatggacattgattgattccaacacttgtttatattaaaacagactattataaagctttaagttgtcaactttgttctgaatatcaactagagcaagcaaatactggagatttcttagtcagtttttaggggacctcgggggtggggtatataggtaatatacagagcattttgacttctaaatagttagatccagagatgaagtgcactgttctctcttcattacggtcctgtttaagagcccagctagtctatctgagctctcgcctccatccttgttttaatcatgcttctacaaggtgaagtgtgtttggggaaactgagctctaacaaaagccgcgacagccaccaggcaggcttttccttatacatgacagaagttcgtattacgccttggaaggtctaggtggagatcaccaccagcattctctgcctgtggggttgtggggctggtgctttctccatttctgagggtcaggatggccaagcatggattaacactaggagagtgcagagcgcagcagagcctgctctcatccctctatccccagcccagtcttcctcctccatccttaagcagtataaatgctatgtgccctcttcacttagagcgagctttagtgtgtcaagggactctgctttcctgtacttcctaaaagtacattcactaatactgaagcatcaaagtgtagtttaaccttaaggttgggttgtaaataacacagttgggtgtaggcatggtaaatctgagcagtccatccttagtatggtggaaagatttgtaccctgacccgctcgagtggtggtagatgtatgtaaattagaagtttgaatgggacaggatgagagttcgaggctctttgtttggtatcttttgtgttaatgtgtcttgaatctgccaatctgtatgttaaaacagctgacagattgtaaagctattgcactgcgttgccctggacaagtctgaaattggtataaaagacaaggtgcccaaggtcacaagaacacctcattgccgactgaagccagtgtcagggcaccacatactcctggggccagtctacaggaaagagatgttctgcaaacaagggtggatgcctgcagtagaggtcagagctggttacctgccttagttacaagtgtcggttatgttctgggtctttgtaatcgctgatctctgtaacagagcctctgtttatttttg

SEQ ID NO: 1417 - protein, 796 aa, Mus musculus
MSVVGIDLGFQSCYVAVARAGGIETIANEYSDRCTPACVSFGPKNRSIGAAAKSQVISNAKNTVQGFKRFHGRAFSDPFVEAEKSNLAYDIVQLPTGLTGIKVTYMEEERNFTTEQVTAMLLSKLKETAESVLKKPVVDCVVSVPSFYTDAERRSVMDATQIAQCLRLMNETTAVAYGIYKQDLPALEEKPRNVVFVDMGHSAYQVSVCAFNKGKLKVLATAFDTTLGGRKFDEVLVNHFCEEFGKKYKLDIKSKIRALLRLSQECEKLKKLMSANASDLPLSIECFMNDIDVSGTMNRGKFLEMCDDLLARVEPPLRSVLEQSKLKKEDIYAVEIVGGATRIPAVKEKISKFFGKELSTTLNADEAVTRGCALQCAILSPAFKVREFSITDVVPYPISLRWNSPAEEGLSDCEVFPKNHAAPFSKVLTFYRKEPFTLEAYYSSPQDLPYPDPAIAQFSVQKVTPQSDGSSSKVKVKVRVNVHGIFSVSSAALVEVHKSEESEEPMDQNAKEEEKMQVDQEEPHTEEQQQQPQTPAENKAESEEMSQAGSKDKKTDQPPQAKKAKVKTSTVDLPIESQLLWQLDREMLGTENEGKMIMQDKLEKERNDAKNAVEEYVYEMRDKLSGEYEKFVSEDSLGQPIKTRFQESEERPKLFEELGKQIQQYMKVISSFKNKEDQYEHLDAADVTKVEKSTNEAMEWMNSKLNLQNKQSLTVDPVVKTKEIEAKIKELTSICSPIISKPKPKVEPPKEEPKHAEQNGPVDGQGDNPGSQAAEHGADTAVPSDGDKKLPEMDID

SEQ ID NO: 1418 - DNA, 71870 bp, Homo sapiens
  misc_feature (1)...(71870): n = A,T,C or G
tttatcccctcctccctaggtcaggcacgcaggcattgtctctccctatgttacatgtgcctgcatgcccacacacccacaattgggcttgtaactttaagttcatagtacctttgcaatctggcttgcaacttcatattcaaagtccctttgaagctactccatgtacccactgaatactgagttaagatttgaccaaatcagacccaaacaaatgaagagtaatgatgcacctagaggaaagtttggttggtccaggtaccctgtattctatagttaggctatggtattcagagtcctatcttttgattccttcttatcttctcatggtgtgtgtgggtttttgttttattatttttatttattattattatttttgagacggagtctcactctgtcaccaggctggagtgcagtggcatgattgttttattatttttaggtggtttcacttcatctcccaggctggagtgtagtggcatgaacagggttcactgcagcctccatctactgggctcaagcaatcctcctgtctcagcttccaaaagtgttgggattgcaggcatgagtcactgtgcccaacctcctggtggttttgaattaaaacagcaacctgatttggcctatggtaggatctctagagggattcaatatgctgccacataactttccattcctttaaaagggttctgttattaatgttaaattattttcgccactctccaaaaacaagcctaccctaatggattagatagtgcacagtcagccccttcaacagaacagtaaagttggtaaggtttgtctgcctttgcccctttgagccttccttcttgtgcatgtgactgtattacatacttcttcctaaactcccctcatttctgtggttatcatttgtcttcattcacggggagatctcagactgttactttgtctcctaaccttggaaaggaattttactttgagagaggatgcccttggaaagaacatgagagagaagccctaatggagatatttcaggtactattctaaaactgctaaaagtgactttttaattttatgtatgtgtgtgtgtgtgtatgtatgtatgtatgtattgagacgtagtcttgatctgtcgcccaggctggagtgcagtggcgcaatctcggctcactgcaacctccgcctcccgggttcaagcgattctcctgcctcagcctcctgagtagctgggactacaggggcgcaccaccactcctggctaattattttgtatttttagtagagacggggtttcaccatgttagccaggctggtctcgaactcctgaccccaggcaatctgcctgcctcggcctcccacagcgctgggattgcaggcatgagccaccgcgcccggccaaaagtgatctttttagtataagtaggaccctcatatatatataaagaagagtttattaagtattaacttaaatgatcacagggtcccacaatagactgtctgcaagctgaggagcaaggagagccagtccgagtcccaaaactgaggaacctggagtccgatgtttgagggcaggaagcatccagcacaggagaaagnnnnnnnnnnnnnnnnnnnnnnnnnnnnnnnnnnnnnnnnnnnnnnnnnnnnnnnnnnnnnnnnnnnnnnnnnnnnnnnnnnnnnnnnnnnnnnnnnnnnnnnnnnnnnnnnnnnnnnnnnnnnnnnnnnnnnnnnnnnnnnnnnnnnnnnnnnnnnnnnnnnnnnnnnnnnnnnnnnnnnnnnnnnnnnnnnnnnnnnnnnnnnnnnnnnnnnnnnnnnnnnnnnnnnnnnnnnnnnnnnnnnnnnnnnnnnnnnnnnnnnnnnnnnnnnnnnnnnnnnnnnnnnnaaatgttaatcttcccaggcaacactttcacagacactcaggatcaatattgcacccttcaatccaatcaagttgacgctcagtattaaccatcacactgatcctttatcaaattgcaaatattcacactctgggcagggcgaggtggctcacacctgtaatcccagcactttgggaagctgaggtgggtggatcacctgaggtcaggggttcgagaccagcctggccaaaatggtgaaaacccatctttattaaaaatacaaacaaattagctgggtgtggtagtgagcgcttgtagtcccagctacttgggaggctgaggaaggagaatcgcttgaacccgggaggcggaggttgcagtaagctgagatcatgccattgcactcaagcctgggaaacagagtgagactctgtctcaaaaaaaaaaaaaaaagttttgtaagttgcaggaatgagatggcagctgctattactgcagtacagttccctgtaggggcctctatacttagggacaggacagggacaggccaggctagagcagagctgggctgaggaggagtcatgttgggcatcagcagactaggccaatagggaggacttgggggtggagttggaacgttagctgccagaggtggaaaaaaacctagtctggggctaggtgaggagtgttggagccagtgaaaatgtgagtcatgtcaggaaaatcactggtgatcaaggggcctagacggaaggtttaaaatttcagaatgtcagcttatatggcccagagaaatctgtgcagtgttcccccagcactttttttttttttttttttttttttttgagacggcgtctcgctctgtcgcccaggctggagtgcagtggcaggatctcggctcactgtaagctccgcctcctgggttcatgccatctcctgcctcagcctcccgagtagctgggattacaggtgcccgcccccacacctggctaatttttttgtatttttaggagagacagggtttcaccatgttagctagtatggtctcaatctcctgacctcgtgatctgcccgcctcggcctcccaaagtgctgggattacaggcgtgagccactgaacccagcctcccccagcatttaaaagttacaaagagggaaagcactgggactactaatgacgctgcaagccatatacattaagtgaaccagcctgaataaggacaaaaaaatagggcttaagagaaaaggccactggatgagatcatagtgctgttatgtaagccgacagtttgatagccagagtggagtaaagaccctgggattttagccaatttggagttagaagtgaattgtgaggccgggagcggtggctcattcctgtaatcccagcactttgggaggccgaggtgagtggatcacgaggtcaggagacccagacaatccgggccaacatggtgaaaccccgtctctattaaaaatacaaaaattagctgggcgtggtggcgcgtgcctgtaatcccagctactcaggaggctgaggcaggagaatcacttgaaccagggagtcagaggttgcagtgagccaagatcgtgccactgcactccagcctggcaacacagtgagactgcatctcaaaaaaaaaaaaaaaaagagaagtgaactgtgatggtagtttttgtatcaaaagagcattatgggcctggcatggtggctcatgcctgtaattccagcactttgggaggccaaggtgggaggatcacttgaacataggagttcaagtccagtctgggcaacaaagagagacccccatatacacaaataattacaaaattagctgggtgtggtggcatgcacttgtggcctgactactcaggaggctgaagcaggaggacggcctgagccagggaggttgaagttgcagtgtaccatgatcaagccattgcactccagcctgggccacagaatgagaccctgtgtcaaataaaaaagcgttatgcttagaaaaatgcttgagtggccatgcgaggtggctcaggcctgtaatcccaacactttgggaggccaaggtgggtggatcacttcaggtcaagagtttgagtccagcctggcaaaatagtgaaaccctgtctctactaaaaatacaaaaattggccaggtgcagtgactcacgtctgtaatcccagcactttgggaggccaaggtgggtggatcaccttaggtcaggagtttgagaccagcctgaccaacaaggagaaaccctgtctctaccaaaaatacaaaattagccgggtgtggtggtgcatgtctctaatcccagctactcgggaggttgaggcaggaaaatcgcttgaaccttggaggcagaggttgcggtgagctgagattgtgccattgcactccagcctgggcaacaagagtgagagtccgtctcaaaacccccccccaaaaaaattagctgggcatggtggtgggcatctgtaatcccagctacctggaaggctgaggcagggggaatcgcttgaacccaggaggtagaggttgcagtgnnnnnnnnnnnnnnnnnnnntcttcatagagatggggttacaccatgtcggccaggatggtcttgatctcttgaccttgtgatctgccctcctcggcctcccaaagttctgggattacaggcgtgagccactgtgcccagccattaatctggtagttgtgttttttttttttttttttgacagagtcttgctctgtgtttcaggctggagtgcagtggtgcgatctcagctcactgcaatctcttcttcccgggttcaagtgattctcctgcctcagcctcctgggttgctggggttataggtgtgtgccaccacgcctaatttttgtatttctggtagagaaggggtttcaccatattggtcaggctggtctcgaactcctgacctcgtgatctgcccacctcggccccccaaagtgctgggattacaggcgtgagccactgcccccagcccccagtatttcttatatttctatttatgattatacaaagttaaagaggtttcccacaggacttctcagaaccttaaacatggtaacattaacctatcgatatctcctagaacaaacgctgtcctgtgaaacacagtttgggaggccgaggtgggagaactgcttgaggccaggaattcaagacctgtctgagcaatgtagtgagacccccattcatttcattctttctttctttccttcctctttttttttttccccagagtcttgctctgtcgcccagtttggagtgcagtggcgtgatctcagctcactgcaagctccgcctcccagaattcatgccattctcctgcatcagccttctgagtagctaggactacatgcacccgccaccatgcctggctaattttttgtatttttagtagagacagggtttcactgtgttagccaggatggtctcgatctcctgaccttgtgatctgcccacctgggcctctcaaagtgctgggattagaggcatgagccactgcgcccggcctctttttttttttctttctttccttccttcctacttctctttctttcttccatttttcctttctctctctctctttctttctttgagacagagtctctttctctcacctacggttggagtgctgtggtaccatctcagttcactgcaacctctgcaacctccacctcctgggctcaaggggttctcctgcccctgcctcctgagtagctgggattacagatgcgtgatatcaggcccagctaatttttctatttttagtagagaaggggtttcaccatgttggtcaggctggtcttgaactcccaacttcaggtgatccacctgcctaagcctcccaaagtgctgatgagaggtgacaacgtgctagcagccctcgctcgctcttggcgcctcctcagcctggcgtccactctggccatgctcgaggagcccttcagcccgcccctgcgctgtgggggcccctctctggggctggccgaggctggagcaggctcccactgctcgaggggaggtgtggagggagaagcacaggcaggagccggggctgcccgcagcactagtggcctggtgtgggatccgggtgggagtgggtttcgcgtgggcgagggctcagtggcctgcactcagcgctgccgactggtgcctgctgggcttgatggggggatgaactccctctgggctgctggagtgccccggctagatgccacaaagtcccatggtgagtgccattgagaggtgaagctggctgcgcttctgggtctggtggggacttggagaacttttctgtccagctaaaggactgtaaacgcaccaatcagaactctatgtctagctaaaggtttgtaaacgcaccaatcagcactctgtgtctagctggaggtttgtaaatgcaccaatctgcactctgtgtctagctaatcaggtagggtacttggagaacttttgtgtctagctaaaggattgtaaatgcaccaatcagcactctgtgtctagctaaaggtttgtaaagacaccaatcagcactcggtcaaaacggaccagtcagctctctgtaaaatggaccaattggcactctgtaaaatggaccaatcagcaggatgtgggtggggccagataaaggaataaaagcaggctgcgtgccccccaccttccccaacaaccagcagcgcaacctggtcaggtccccttccacactgtgaaagttttgttcttttgctcttcacaatagatcttgctgctgctcactctttgagactgcgctgcctttaaaagctgtaacactcactgcaaagttctacagcttcactcccgaagtcagcgtagaacacgaacccaccagaaggaagaaacttcagacacgtccgaacagcagaaggaacaaactctggacacaccatctttaagaaatgtaacaccgcgagggtctgcagcttcattcttgaagttagggagaccaagaacctaccaattctggacacactgggattacaggcatgagccactgtgcctggctaagagatcctcatttttacaaaaaaatgaaaaaatgagttgtatgtggcagcacatgcctgtagtcctagctactcaggaggctgaggtgggaggattgtttgagcccaggctgcagtgagctatgaacgtgacactgcactccagtctgggtgacagaaagcgatcatctaaaagaagaaatagagaagcagtgtagttgtgagaaaattgtgtgaccttgaacaagtaccttaaccttatcaggtctctataaaataggaaaaatatcacctacctgatgggcttgctatgacgagtaaaggaattatattggtatcaatacagtgtctggcgtaatgctagcatatgctgtaggaatgccagagacatggtaattaccattattattgagttattggagttttggtgtttaagaaagggttgttgctttgactaaaagcattgctccactcactgtaagatcagggaagtcagaaaatcaccattatctgagcaggtagtttccttgtgaagcaaaaaattgcagaagctgctccagagcgtagggcaggattccactggacacttgtcagggagaaatatgagtccccagctgatggagaaccttttgtcttttgttgggcagcctatgaacactgtatatttaaaaacaaacacttctgtgattgcttaggactaaatttaatcgttgtatttgagagtggcatttaacaacttcctgcttttaaaatacttaaatacctaagatactctgccaaatggaaagaatttgttctccgaacacagtgcctccaacattaaatattctggacacttcgttggttcgcaattgtgatacttggaaacttgccacgttagattcttcaggattctaaaataaccttttcctgacttcatttatttaaatatcccagaataatctcttaagctataagtttgatgatccaggaaactatttataggaggatgagtactctctgtgactgatggtagttatgttttattttgagaaggacaaatcattaaaaagattgatagggctggtggtattttaaactgaaagcagtaccaaggcaaacaaggcagttgaggtatgaagttggaacataataagatatgggtgtaattttcatcaacttagctaagacctagggaggtcttccaatagaaggaaggcagaaacaggcagtaacacagacagtgatcttttaggtccactggacactttagcttaggcagctcgggttgtttgctcagtgattaacaactgagataaacagatggagacaggactctgtcataattaaggtcaacagtgtgcttggtattattgatattgcccctaggtaggagaaaaacagaggaaggaaggtcaaggtcaacctaacttaaaaaaactttaaaaaattgtggtgaaatatacataaaatttaccattttcatcatttttaaatgtacaaatctgtcactgatcatgcacattgttatgcaactaccaccagcatctatctccagaactttctcatcttcccaaactgaaactctgtatcccttaactctccatttcactctacttgtgaaaccgcttttctgtctttatgtagtttattgtaggtgcctgatacaagtggaatcatattaaattttgaatataaaattaaaaattaaaaaaaattaattttgatttgtttggctttccacttagcgtattttcaaggttcattcatgctgtagcatttatcagactttcattcctttgtcttttcaaagctgtataatgtactgttacgcgtatacactaaatttagaaaactcattcatctgtcaatggacatgtggattgtttcctccttttagctaccgtgaataaactactatgaacatgggtatacaatgtacaaatatgtccctgctctcgtttttccaaaggctgttcctggctgcctctactctttttattcccagtacccttttacaggtagcacctggtacttgtctttgaagaattaacaggttttagttaggcaaaatgtgagaacagtgtggccatttgcaagttttaatggtaatcaacccgggtttggggttgctcctatagagtgaagtacctccggaggtggcaggaaatgcaggtatttaaagggaagggcataccagggcaatgtaatttcttctttgctcattcacttttaaaatggctgaagggcaggtactctagccttgagaccttcaactcatgatgtaccctccagcaacggagaatttctttttagtccttaaactatggtctctattgctagttttccaaacttgaacacagccttttccttttctgggaagttgtcctagtctccaccattctgtgcatatagcactcgccattctgtactggggtcacctttacttgtttagccaccctcatgatggggatgatccaggttttgcagaggtgaaacttatataccattggggggccctacaaatacacaaaacaaataattaaaacgacaaatcacaacacattactagagacttggagattcagattctccttagatctctctgggtaatttattagaaatgcttacatagatttgcttcctaatctcaagctggcttcccctctccacaactcagcaactatctattctcccaggaggccatacaagcgaggggccctgaagcttaacatttattaacttcatgtaaaggtctgagcggacctttcaggccaggcagcgtgtcacttgcctgtgttccttgttagggcctaccaccgggtaggtgcttggaatgtgctgtggattaaaggcttaaatcctgcgggcccctcaatctgatctaaggacatgagtggcttagagaacggcgcaacaaggctaagcgaaagaaaacaaagcggtgtggctgggagtgggctccttccctccgctggtgagggtgcgatcttagactcttgagagaacccgacataaaggccgcgttccaatggcggccttctcccctaccggccaacctgccccgaaaagagcagaaggcaccctgcgggatctgcagatcagcttgcgtctcattctggggcaccgacacggtggaatgcaagacaccccactaccggaagtttctttgatgttaagaaaaacggcggaagtaggccgcagcgcttcctcagtatagtgcctcgagctggctcgcctactttctacggtaaagggaggtgctccacatctctatgcagctgtgcagcgccgcaggttccatgcgcaggctcggttggctaaatgcgctttccagccatctttcagccacccagtcctttcccaggttctcgagccaggacgtgacgtattcagacgtactgggggcggggcctcaaggggaaaagcgcctgagccgggatatcgcgagaacatcccgttctttcgtagctctggtgctgcggctccgctctcgtcgcaacgagatctttcgagatcttctccgcccccgctaccggcgcctcctctgcggccactgagccggagccggcctgagcagcgctctcggttgcagtacccactggaaggacttaggcgctcgcgtggacaccgcaagcccctcagtagcctcggcccaagaggcctgctttccactcgctagccccgccgggggtccgtgtcctgtctcggtggccggacccgggcccgagcccgagcagtagccggcgccatgtcggtggtgggcatagacctgggcttccagagctgctacgtcgctgtggcccgcgccggcggcatcgagactatcgctaatgagtatagcgaccgctgcacgccgtaagtgtgggccgggcctgccgcgtgcactggggttaggagataatgcttgttccagtctgggaccctcgctgcttggggaacgcgggccgaggagtcgcctccgttccgagccgaggtcccggtaggtcagggacccccagtaggtattaggacactaggggccgcggcccactatgagcgtgggtgtgtgctaagcgcgagggccttttccccggtggcccgtcggccgaagaaaggcttctggccggtactcggaccagcggagggcacgggtaggaactggaaggactgcaggcctaggatgtaaacggatcgcggtccttttcttgagggcagagaccaggcccaggtcgtactgagtcttttgagtccaacagaaagctcagaactttgcacacagcaggcgcttaataatagttgaatcgaacgggttctggggcttgccagccgcgagaccgtggagcggtcagcgtcccacgtgagtgggggcggggcagcgcccggaagagagcgagctggagcagcctcaggcacgggttccggatggactcggggtcttgagattgggttggcacggataggaatttaataaaatcggtgctattatgataactttgcaatcgcttttgttttccacattatttcgggatattgtgctatattgggtcactctctgttttgtgcgcgttaacccctcaatagggttgcactttaacgataatgcattctaaccagtgtgttggccacaattgttagtggctcaagggcccgccttgacttctagaacccatagtaagttttgggaccagcatagacacagttctaaaaaatggtgggtcactcaggtctttcactggttacagtgtctgccttttgaatacttgtagatacattttaatccgttgtcgtgttcttagacaaaatcttgtaagaagttctgtattatttgccattcagggtctctcttctttttttttttttttttttcttttttgagacagacagggtctcactctggctgcccaggctggagtgcagtggtgcgatcttggttcactgcagcctcgacctccctggctcctggctcaggtgattctcccacctcagcctcctgagtagctggcgttgcaggcgtgcgccaccatgcttggctaattttatttatttttagtagaaatcgggtttcactatgtcactcaggatggtctcgaacttctggactcaagcagtcctccagcctcggccttctggagtactgggcttacaggcatgaaccaccgtgccctgcccaggggctcacttgttattgattgattgagatggagtctcgctctgtcgccccaggctggagtgcagtggcatgctactcggctcattgcaacctcggcctcctggggttcatgcgattctcctgcctcagtctccctgaggagctgggattacaggcgcgtgctaccatgcccggctaaattttgtatttttagtagagacggggtgttgtcgagttgcccaggctggtctcgaactcctgacctcaagtgatcctcccgcctcggcctcccaaagtgctaggattacaggcgtgagtcacggtgcccggccccaggggctcaattctaaggtccattattttcaccctcaatttttgtcacatttcttcagcaggtttcagcgaaactagattgttcagaagtctcacatttcctttccacttgtcaaatttccgcaccccccacctcctaacccaggtgcttcccctgaaaactcatcccagaagccaaaacggtagtttgctgtccctttgctgagtttagtcttgttaacagccctattaaggtttatttatttatttatttattttgagaaaaggagtcttactctgttccctacgctggagtgcagtggcgtaatctcggctcactgcagcctccgcctcctgggttcaagcgattctcctgcgtcagcctcccgagtagctgggattacaggtgtgcgccaccacgcctggctaatttttgtcttttttagtagagacagggtttcaccatgttggccagggtgggctcgaactcttgacctcaagtgatctgcctgcctcggctttccaaagtgctgggtttacaggagtgagccaccgcacctggcacagctttattaaggtttaattcatatactatacaatttaaccagatgaagtgatcgtttttagtgtagtcacaaaacagtgcaaccattactgtaatcaattttagaacatttttatcactcccccaaagccctgtgccctttagcagtttattttccctatttgtactttttaacaatgggtagtctaacttggcatctccagggaagtgtattgtgccctgaagtttttttttaagcattaaagtttgtttttaagcattttagtatttgagaatatctttgtatccgtgttttcttggtctataaaatgtctcccctaaggaactgaaaaggctaaagcgctgagttaatgtatttagtgttttggtcctttcctgccctgtgattgaacacgctttagttccaaagggcgcacaggaagagaatcccaagtatggggaagaacagtgttcctatcctttcttttagattattatcacatgctcctgtttttcttttagaaagacaatagctacaacaattataccatgaattctatttgaaactgagttgttgcagataaaaaatttgcctcaaagacattgtgatatatatgaccccatacaccacggaattgtgataagaaaattccatttaaataattttccttacatgttttctttatattttccttcatagttttcattaacttacaggcatgccatacatttcaagtgatttctgaactgtatgattttgattcactttgattactctgttttggagtcttgggctaaatagaaaatggtagcaggaaggttgattttttttttttttttttttttttttttttggtagcggttatggaggaatggatttggagctcatatgtaaaaaagactgcatgttgtgggtttgttttaacatgagagtggaaatgagatgcaagtcttagagggtttatgatggtggaagtacctcgtttcagatatgggtgtaacaatctggattaggtttttgaggagccagtggagtctcatccagaagagacccttgattttccacccaatttaggcttccttcattttatcagatgttgagtgcctctgatgtggtagccatttttctaagcactggaggtactgtggtgaacaaataaggtcatgccattatggacatggctggtggattaaaccaaatactaaacaaaaatatgtagtaattactaactgtggtaaagggcaaggtggaaaagtacagaatacagtgagagtatagaataagcgggtctaatttaaattggatggaaggacctggcacgatagctcatgcctgtaatcccagcactctgggaggctgaggtaggaggatcgcttgaggtcaggagttcgcaaccagcctggccaacatgctggaaccctgtctctactaaaaatacaaaaattagctgggtgtggtggcgggcgcctgtggtcccagctactctggaggctgaggcagaagaatcgcttgaacctggtaggtggaggttgcagtgaaccgagatcatgcactgcactccaacctaggtgacagagcgagactctgtctcaaaaataagttgggtagaaggtgctttgaaagaagtaccatctgagacctgaggatgagtaggattttaccttggaggtcacagtaggtttgaggaagagttgttccaggcagaaggaacagcaagtgggaaagacctgagcaagaagagctgcatccttgatacattgaagagcagccacgactctttcagctgcttgagagaatgctgtgagatgaatctgaggaattaggcagagccttgtaaataataataatgatttttacctaggtgcagtgggaagattattttttgacacggagtctggctctgtcacccaggctggagtgcattgttgcggtcatgtgcatacatgcggctaatttttgtatttttaggtagacgtggtttcgccatgttggccaggatggtctcaaactcctggtctcaagtgatccgcccgccttgacctcccaaagtgctgggaatacaggcgtgagccaccgcgcccggcctgtaaaattctttattatggctctaacacgttttcttcaaacaggttatttctaactttttgctgttacaaatagttcttcaataagtagccttacatatttatgttgtaatgttaatgcttttatttttattgtatagatttccagaggtgaatttgctagggtaagggatatactgtatatacttaaagtttcagtaatattgccagaattctttacacaaatataacagattaatttgcagtaggaacagatgtgatttctctacttcattggagattatgagaattataatgagttaaaactataacttatacctttttttttgccatagtgctcagaataatgcctgggattcagtaaatactgccaaagtatttgctaataatactattactttttgtattttttattaattttttatgagattaggacagtaagatgaaatctatggaagtttaccttttgggttctacaactgtgtacttttaaagtgcaaaggttaattactgaggaatttgctgtgtttttaggaacagcaaatctcaaaagtatgagttgtttggtctgttgggtatcagctctttttggtactttctagtccatggctaatgcagtaaccagagagtactctgattaatgtctctatttccattctagttttgcctatcagttgtatgtgatagtctaattattgcggtttctctgaaaagctcattttctcctattgttgaagaaagtgaattagagcaatggctgttgtaatatcctgagagtagttctgcgtaccttttttttttttttttgagacaatgtcccactctgttgctcaggctggagtgcaatggtgcaatcttggctcactgcaacctccgcctttcaggctcaagcagttctggtgcctcagcctcccgaatagctgggactacaggtgcatgccaccgcgcctagctatgcatagacttataaaaatgaaactataccttttaaaggacctatgccaattgcagctgttcataatatcctctcagaatgtgcataaatattcggtcagtagtttcttttaagaaaaggaaaacagtgatattgtctggctgaaaaaagaagtaatttctaggacttaaagattagaacagagggatcttaaacttgatttgaattaactccgtgcaatttggaatggaggaaaagcaatgtcagtcaagcagcaaatgtgtgagtacttcttatggattaagcagcattgacttggcattgtgtgtagtatagaagaagtgtaagatagagattcctgctgtctagttgtaatcaatgtggttaaaatatgaataacataagcagcagtaaatagaatgagtccaattatggacaaggctgtgtgatacagacctaaaataccatgttcaaaggagatgtaagcagtggaggctaaactgatgaggaaaggctggagtgagacttgaacaaataggattagataatacatggaataaaggattcagatagtttgagtgaaggatggaagtaggaatgaattaaggctggctgtggtggctcatgcctgttatcccagcactttgggaggccgaggcaggaggattgcttgaagttaggagtgtgagaccagtctgggcaatatagcgagactctgtctctataaaaaatttaaaacattagcaggctgtggtggcatgccagctacttgggaaactgaggtgggaggatcacttgaggttagtgatcaaggctgcagtgagccgtgattgagtactacactccaagcctgggcaacagagtgagaaccatctcttaaaaaacataacggggctgggcacagtggctcacgcctgtaatctcagcacttgaagaggctgaggtgggcgggtcgcctgaagtcaggagtttgagaccagcctggccaacccggtgaaaccttgtctctactaaaaaatacaaaattagctgggtgtggtggtgcatgcctgtaatcccagctgaggatgaggctgaggcatgagaattgcttgaattcgggaggtggaggttgcagtgagctgaggtcatgccattgcactccagcctggccatcaggagtgaaactccatctcaaaaccccaaaaacaaaaccaaaacaaaatagggccgggtgtggtggtttacatctgtaatcccagcactttgggaggccgaggtggggggatcacttgagctccggagtttgggaccagcctggacaacatggcgaaaccccatctctacaaaaagtacaaaaattggccgggtgtggtggctcacacctgtaatcccagcactttcgaaggccgaggtgggcaaatcccctgaggccaggagtttgagaccagcctggccagtatgctgaaaccctgcctctactaaagatacaaaaattagctgggtgtggtggcacgcgcctgtaatcccagctccctcaggaggctgaggcaggagaattgcttgaatccaggaggcagaggttgcagtgagccgagatggtgccactgcactccagcctgggtgacagagtgagactccgtctcaaaaatagtaataataataataatagaataataaaagaggctgggtgtggtggctcgtgcctgtaatcccagcacttcgggaggccaaggcgggcggttcgcctgaggtcaggagtttgagaccagcctggccaagatggggaaaccctgtctctactaaaaataaaaaaattagctgggtgtggtggcaggttcctgtaatcccagctacttgggaggctgaggcaggagaatcacttgaacccgggaggcagaggttgcagtgagccgagattatgccattgcatccagcctgggtgacaagagtgagactttgtctcaaaaaaaaaaaaaaaattagctaggcatggtggtacacacctatagtcccagcttcttgggaggctgaggtaggaggattgcttgagcctgggaggcggaggttgcagtgagcagatatcgagccactgcattccagcctgggtgatagagtgagagaccctgtctcaaaaccagaaaaaaaatccaaaatgtgtgtatacgtggggtttggagtctgatggtcctaattttgaatcatagactctaatacgtttctgggcacactgacttgacttgaatcagctcttcctgtatactaatcccatttctcagagaatataggattatcaagtgtaggatgcttagcacaccacctggcaccagaaggctctgtaatgagaactatgaaacaagggatcttgacctgcttggatgagagaggattcctgccatggatagggatcagggatgtagactgcaagatttgaaagttcttgttgactggaaagtagtaggtatatttcctttaaatattcttgtcttgcttattccgtgtcaaaatcctcaataattcagccattgaagacttttcagagcatttgttgaggagaagcaaactgattgtggtatatcagttttacttttttttttttaggacttactagatttattaggattacataggagtatttacctaaatgttaatagtggccctctgtggtggggggagggttgtggaagtatatataatttttatttttttcttcatacttgtctgttttctaattttctacagtaaacttgtaccaagaagcattgacctatgttctagtgctagcgctaatattcaagttaatctttttgagtattcatatcatttaaatattaggtttctttatgtaagcctttagttttcaaaatccttcaatttgtgctgttatacttttttttttttgcgacggagttcgctctgtcgcccaggccggaatgcagtggtgcaatctcggctcactacaatctctgcctccccggttcaagtgattcttctgcctcagccccctgagtagctgggattacaggcgcgtgccaccatgcctggctaatttttgtatttttagtagagacgggtttcaccgtgttgtccaggctggtctcaaactcctgacctcagatgatctgcccacctcggcctctcaaagtgttgggattacaggcctgagccagcgcgcctggtgctgttttacatactgacccaattcagcaaattgatcatattctgttttcagttgtcgttttttaatggaagtaggacttttttttaaaatcccacatcaatagataattttaaaggtagctgactagatttcagttccagtaggtgaaacaggactttttttttttttttttttttgagacaaggtctcgctctgtcactcagggtggagtgtagtggcatgattttagctcactgcaaccttgactgcaagaactgagttttaaattttatttaattttaaataatttaaatttaaatagccacatgtggctagtggctacttcattagacagcatgtatctgtaactgaagacctcagattttacatttttcattaagacttggtacgtgcacacacacaactgaaaagcttcattaaacaacagtactttcacatgcagtgcatacatgtgttttcttttctttttttttttttttgagacggagtcttgccctgtcacccaggctggagtgcagtgacgtgatctctcctcactgcaagctccacctgctgggttcacgccattctcctgcctcagcctcccaagtagctgggactacaggcgcccgccaccatgcctggctaattttttgtatttttagtagagatggggtttcactgtgttagccaggatggtctcgatttcttgatctcgtgatccacccgccttggcctcccaaagtgctgggattacaggtgtgagccaccgcgcccggccgtgttttctaagttgctgttcatgacttcttccaacccctgattgattttagacccacacatgggttgtgacttacggcttataaaacattgttttagcaagggaaataaatgtgttagtattgataatgtaattcggtttgtggttggtgttaagtagaaattaaaccaagtccagttttaagaggtaaaaaggattaccacccctccccaccacccgactgagtcttgctctcttgcccaggctggagtgcagtggcgtgatcttggctcactacaacctccacatcctgggttcaagcgattctggtgcctcagcctcccgagtagctgggactacaggcgtgtgccaccacgcctggctaatttttttgttttttgttttgtatttttagtagagacagagtttcgccatgttggccaggctgatcttgaactcctgacctcaggtgatctgcctgccttggcctccctaagtgctgggattacagacgtgagccaccgtgcccggtaaacgattactttttatttgggggctggggtgggttgagaaggctttacagacaaaataggtggaatttctagagaatacgtgaaggtactaagcatttcagacgtcaaaagtgacataagcaaagcaggaagattgggatactttattcaacttgtgttgattgtgtggatgaaatacagctggaaaatgggattgggttgggagaggccttaggttccatattaaggaatataggttttatttgttggtagttggttttgtttggaaggtaattagaagcaagacagtttcagagttactgacatagaataggaaattaacccttcagcaggatttgcaggaaagttggggattgtaattattttgaggagataaaggtttgaaaaagggctgcaggaaacaatggaagatgagtaacattgccttttagttatgttgtgattggggtcatggtgggatataccttagaaatttagatctggtggtatttagaaagatggaggtgtgccaattattaggcttatgctaggcagcctttttgaggtggaggaagtgggtaagattgccttgggcaatttcctaaagggtaatatgggctttgagaggagagacatttacgtggtagtgaggatttttttttatttatttgcatctagtgtctaaaacagagattttatttgttttagtgattggtggcatagttgcagaaaggctgagcttgacacctttgcttttgaggggctactcccagcactttctaggcccaaaagcttaggatttggaggaattctgatgaggtcctagggtgtaccatgtttgttcttcctgtcatttaatagaagtcatggcttcctgtggctgccctgggagattggcttacaggggttcttagccattggttgtgaaggaccactgaagcccagggaggcccagcattctgccagtttccacagggctcttaagtttatgtttctaccaaatcagtagttcatctaatttagtcagatttggaccaaggcagtatggttccagagctcttatttactctgttgacttgggannnnnnnnnnnnnnnnnnnnnnnnnatcttggctcactgcaacctccgtctcccagttcaagtgattctcctgcctcagcctcctgagtagctgggattataggcgcccgccaccatgcccagctaatttttttgtatttttagtagagacggggtttgatcatgtgggcgtggctggtctcgaactccagacctcaggtgatctgcccgcctcggccccccaaagtgctggaattacaggcatgagccaccacgctcggccaaaatttacttatacttattaatgcccttttttgtttgttttgtttttgagatagggtcttgctctgttgccaggctggagtgcagtggcacaatctcggctcactgcaacctccgactccttggttcaagcaattctcctgcctcagcctcttgagtaggtgggattacaggcacatgccaccacgcccagctactttttgtatttttagtagggacagggtttcaccatgttggcctggctagtctcgaactcctgacctcaggtgatccgcctgcctcagcccgccaaagtgctgggattacaggcgtgagccactgcactttttaagcataagcacagagtttttatttaacttcaagcaggtttcagnnnnnnnnnnnnnnnnnnnnnnnnnnnnnnnnnnnnnnnnnnnnnnnnnnnnnnnnnnnnnnnnnnnnnnnnnnnnnnnnnnnnnnnnnnnnnnnnnnnnnnnnnnnnnnnnnnnnnnnnnnnnnnnnnnnnnnnnnnnnnnnnnnnnnnnnnnnnnnnnnnnnnnnnnnnnnnnnnnnnnnnnnnnnnnnnnnnnnnnnnnnnnnnnnnnnnnnnnnnnnnnnnnnnnnnnnnnnnnnnnnnnnnnnnnnnnnnnnnnnnnnnnnnnnnnnnnnnnnnnnnnnnnnnnnnnnnnnnnnnnnnnnnnnnnnnnnnnnnnnnnnnnnnnnnnnnnnnnnnnnnnnnnnnnnnnnnnnnnnnnnnnnnnnnnnnnnnnnnnnnnnnnnnnnnnnnnnnnnnnnnnnnnnnnnnnnnnnnnnnnnnnnnnnnnnnnnnnnnnnnnnnnnnnnnnnnnnnnnnnnnnnnngagtgcctggaaactagttgtagaaaaattacttttttacttatttaatagggcgagagttgttttcagggtttgtagactatattcttggtgaagttgtgagctgtcttaaaaatgttaattgatacattgatgtgagggtacattattttatactgggattttgaacaggagacttgaaaagtaattagaggatggtagagactgtctagcccacctctctagtattctagacaggtagttatcacatcagatctgtgctccagcatgtaaatgacaggactcagttgtaagaggcaacctgttccatggacagatttactcaatagaaaggtcaaaatcatagatttgtaccattaaaatatatggcattttagctgatactcagatcttgcctgctatgcttttggatttattattgtagtaagatttaattcttaagtgctttttttgtcttctagggcttgcatttcttttggtcctaagaatcgttcaattggagcagcagctaaaagccaggtaaagtttcatttttttcctaaaatgacttatttctcctcttcatccatgtgttcagcaagtagttgaatgcccattatgtgcctaacactggtaggccttgggaatacaactggcagatacagacctcttctctgttcccatgtacagtcagccctcagaattccatgggttctgcatctgtagattcaaacaactgtggatcaaaaatatttttgggaaaaaatacaacactggaacaataaaaaatacaaatgaaaacaatccagtgtaacaactacttacatagcatttacattgtattaggtgttataagtaatctagagacaacttcaggtatacaggaggatgtgcataggttataggccaatactatgtcattttgtctaagggacttgagcatctgtggattttggtctaattcaaggagtgccctggaatcagtcccctgcagatacccaggaaccactgcttcagtgagaagcacctggccttaaaatagcattagcagtataatctgtttaatgcaaactgccagggtgtattttgtccagatcttgttaagcaaggcttgcttgttccttgatattttacatgctccttaagtctgtcttgttgggcctttcatcttactcatatataaggtaagtgttgatcttgttaaacaagtttctcaaggaaggaaagcatacctctagaaatacattaaaggacttgcttttagtttactctgtaaaccaggaacctgacgtagttgctggtttctgaataaccagagcagcagaaccccaagagttctgttattctaagtgtctgagatatctgtaaaattaaggagttgcatgtttgaccttcttatggttcagcctggagcaaccctatagggtgaatctgtttttgaatggggcagggcctaaaatttattagcctaaaaaagtggtgcttggccaattggtttttaattaagttggatgttttatagttcattttcacagtgttcgagatcttttaggagacagcaggtagaaaatattgggccattttgaaatctcttccttctaaaatttgagcaaatcgctcctgttttttaaacctgcttttcatgattgagagacagttactatactaaactggctgcccagttctaggttgatacagttattgtgttacagagtttctgtttggcagcttgctcgaggaaggcatgatttgggtggcctcatctgtttcataaaaggacttctgtgtgttccctttcatctagttgatacaggagcttactacatctcctgcattgggaggagcagcctgtaaatcttaagcagaaggtcattctggaattttttgaatatttttgtcagcattttcccctcataaattgtgatagtttattctagaagaattagaaaacatagataaaaaagtgtaagtcacctgttcaaccattatccaaaaatcatatagacatttgtcttaccaccttctgaaaactttacctgttgatatttcattgtatgaatagcccataatttaagcatttccctgttattaaccatttaggctgtttctaggcgtctgctactacaaataatactctcccaatatccttttgtgttcatttttgtgtacttagtatgattttttttttcccctttatgagaaatttgtttcactggaattttttttcttttcttttttctttttttttttttttttgagagtgcagtttttgagagtgcagtggccctgtcagcgcaacctccacctcccaggttcaaatgattctcatgcctcagcctcctgagtagctggggttacaggtgcgcaccaccatgcctggctaattttttgtatttttagtagagacagcgtttcaccatgttggtcaggctggtctcgagctcctgacctcaaatgaggccctggcttctttcaaagtgctgggattacaggcgtgagccatgacacccggccttaactagaatttctaaatcaatttatgtattgctgagttggttcctggaaactttcaaccataaactatgggcaatttttaaaggctaaaagttattttatgtaaatgtttattagaagtttaagaacagaaaatacttatgcaagtataatgacctgacttcatgggatataggaagagcagggctctatttttagccctgccactctgagacccatgcaaatccctcctccctcacttcgcatgctagtgggcaccatttagaaaagtttagggtctgaagaaaccaaaaccaagaaggagactctatataaagttaaaatgttgctaatttaatctgaggctgttgaaataaaaaaaaaattagtagtagtctttccactctttgatattctttctcttaggtaatttctaatgcaaagaacacagtccaaggatttaaaagattccatggccgagcattctctgatccatttgtggaggcagaaaaatctaaccttgcatatgatattgtgcagttgcctacaggattaacaggtataaaggtaaggttgtcaggttaatgccttttaattaaaatgcattattatattttatcagttcaatatctatctgtacttttctgatgtcagattgcaatgaaaatgcttacagttgcttagggaaagcttttttctagtaaagactatttgacaatttttgaatgatctggatgttggttgggagccatgagtggtgctcttaatatgggttggagacctgggtagtgatggtttgaagttaatactgccattgctgcttgttttgctcactgatgcagtgggctttttagcatgattttagggaatgacttctggaagagcaggcaaagcaatcacagttttttttttttttttttgagatggactctcgccttgtcacccaggctggtgggcaatggtgtgatcttggctcactgccacctctgcctcctgggttccagcgattctcctgcctcagcctaccaagtagctgggattacaggcacgtgccaccatgcctgggtagttttttgcatctttagtagagacggggtttcactgtgttggccaggttggtctcgaactcctgaccttgtgattcccctgcctcagcctcccaaagtgctgggattacaggcgtgagccaccgcacctggtaggaatcacagttttaagtcactagcagatagatggacatactcttggagataggatttaatttagaaagagatgttcttttggggaaaagtgagtttggtctttatctctggtacatctagtggagtctctgtgaagtatgcagtgaactgatcacagaaaaagggtaagaggctgggagatggatagggtggacacatttgcctttcttgcactcagaggtagtaagaggaatccatgagggggggtgggggcgtgattggctttccaggcaggtgagattacggagagatttggttttggaggccaagaatcaggagaacaggctggaaagccaagagatgttgagaaccatgagaaaaaggtagtctgctgttgcagtgtagctgataatttagttgtatttagaagtgaaaaattctgaaaattaaagaatgatgactgggttttcttaaaatatctgtggtaattaaggacagtttgaatgggatagtaaaagatgaagctgaagcacaggagagagaaaggggttaaaaagggaggtgaagaaatgtgcaatacttattagaaataagaaataaagaaataggataggtattggcagatttattcataagcattgcaagaagcaaaggagaaaaagactaggaagaagatttgggaaacaagtagatgcaagtctaaaagtggtggaattgacctcagaattaggcaaatagcagggaagaaagagataatttagaaagggcaccaggagggatatttccccatctttatcatgcaataaagtaagaactgttcaattctaaaccataataaattgtggttgggctggggagtcagaaggtggcacgcaagcttgagttagggcagcagctaaaagaagagagcaacatgttctattctggattgtaatttgggaatatgggcatgtaggatgggttgggattgttttaggcagtccttcaatatttaaaattcgtaactgttatcacatttgcagacttttatctggaatagggctttatcttgaagctttgttcattattgttacttatttaaaatttttttttttttttgagacaatatcactgtgtcacctaggctggagtgcagtggcacgatgtaggtttactgcaacctctgcctcctgggttcaagcaattctcatgcttcagtctccctagtagctgggattacaggcatggaccatcatgcccagctaattttttgtgtttttagtagagatggggtttcaccattttggtcacgctggtcttgaactcctaacctcaagtgatttgcccgcctcagcctcccaaaatgctgggactacaggtgtgagccactgcacctagcccatcttttattatttaattcaaccagtatatattgtgccaggtcctgttctaggtgctggagctatggcagtgaacaatcagacaaatgcatgtcctcatattagattgaatcctaattgtggagatggataataaacagtaaacacattaaaatacacatagtatgtcagatagtaaaatagtttctaccagcagcctctttatggagggacagtgtgggtcatggtgagctacactgatttgtctttgcaaaggaagttgtcttaagatttgttgttttacactgtggtccttcatctccaagtatcgtgtttggttgaaagctaaaataggctatgcgtggtggctcatgcctgtaatcccagcactttgggaggccgaggcaggaggattccttgaagccaggagttttgagaccagcatcggcaacaaagcaagaaccctgtctctgcaagaaaaaaataaattagctaggtatggtgacatgtgcttttgctccccgctacttgggaggctgaggcaggaggattgcttaaacccaggaggttaagtctccagtgagctgtgatcatgccacggcgctccagagagagagaatgacagagagagagaccctgcctccaaaataataataataataaaaaaagaagctaaaagtgaccttcaaggtattacttcgaaaactagctttttttttttttcaatcccctcttgagataatgttgcattgataatgggaagcattgttcattttagcttttaggactaggacatgaagaaagaaatataataagtctaggcccctttgttgttttcttgcaggtgacatatatggaggaagagcgaaattttaccactgagcaagtgactgccatgcttttgtccaaactgaaggagacagccgaaagtgttcttaagaagcctgtagttgactgtgttgtttcggtgagtttgatccctatacattattgggaatttgcatgaagaagcagagagaagaaagctgctaatttcaagtaaacttgtttttttgtctcaggttgtaatggttatttaaaatgtttgtcaggccgggtgcagtggctcacgcctgtaatcccagcactttgggaggccaaggtgggtggatcacctgaggtcaggagttcgagaccagcctggccaacatggtaaaaccccgtctctactaaaaatacaaaaattagttgggcgtggtgatgggcacctgtaatcccagctattcgggaggctgaggcaggagaatcacttcaacccgggaggctgaggttgcggtgagccgagatcatgccattgcacttcggcctgggtgacaagagcaaaactctgtttcaaagaaaaaaaaaatttatgaaactagtcttcattttcttactctcttctgctgcttagcttttgctcaggcctcctttgttattctgcctatttaaatctcttctgtttttcaaggtgcattcatctcagcctgcccacttcttcctgtatttttttcatcgcctagcatagcacagggtagccactcatttgttgaattagttggatacccctaattgtaaatggcacttgttctgtatttgtatttgctgttgggatctagcgttaaagacaaaggcaaggtactgggcatggtggtttaatcccagnnnnnnnnnnnnnnnnnnnnnnnnnnnnnnnnnnnnnnnnnnnnnnnnnnnnnnnnnnnnnnnnnnnnnnnnnnnnnnnnnnnnnnnnnnnnnnnnnnnnnnnnnnnnnnnnnnnnnnnnnnnnnnnnnnnnnnnnnnnnnnnnnnnnnnnnnnnnnnnnnnnnnnnnnnnnnnnnnnnnnnnnnnnnnnnnnnnnnnnnnnnnnnnnnnnnnnnnnnnnnnnnnnnnnnnnnnnnnnnnnnnnnnnnnnnnnnnnnnnnnnnnnnnnnnnnnnnnnnnnnnnnnnnnnnnnnnnnnnnnnnnnnnnnnnnnnnnnnnnnnnnnnnnnnnnnnnnnnnnnnnnnnnnnnnnnnnnnnnnnnnnnnnnnnnnnnnnnnnnnnnnnnnnnnnnnnnnnnnnnnnnnnnnnnnnnnnnnnnnnnnnnnnnnnnnnnnnnnnnnnnnnnnnnnnnnnnnnnnnnnnnnnnnnnnnnnnnnnnnnnnnnnnnnnnnnnnnnnnnnnnnnnnnnnnnnnnnnnnnnnnnnnnnnnnnnnnnnnnnnnnnnnnnnnnnnnnnnnnnnnnnnnnnnnnnnnnnnnnnnnnnnnnnnnnnnnnnnnnnnnnnnnnnnnnnnnnnnnnnnnnnnnnnnnnnnnnnnnnnnnnnnnnnnnnnnnnnnnnnnnnnnnnnnnnnnnnnnnnnnnnnnnnnnnnnnnnnnnnnnnnnnnnnnnnnnnnnnnnnnnnnnnnnnnnnnnnnnnnnnnnnnnnnnnnnnnnnnnnnnnnnnnnnnnnnnnnnnnnnnnnnnnnnnnnnnnnnnnnnnnnnnnnnnnnnnnnnnnnnnnnnnnnnnnnnnnnnnnnnnnnnnnnnnnnnnnnnnnnnnnnnnnnnnnnnnnnnnnnnnnnnnnnnnnnnnnnnnnnnnnnnnnnnnnnnnnnnnnnnnnnnnnnnnnnnnnnnnnnnnnnnnnnnnnnnnnnnnnnnnnnnnnnnnnnnnnnnnnnnnnnnnnnnnnnnnnnnnnnnnnnnnnnnnnnnnnnnnnnnnnnnnnnnnnnnnnnnnnnnnnnnnnnnnnnnnnnnnnnnnnnntgatttagtgaactgtttgcaaatcaaggtcctagatgccaggcaaggaccaacatgcaagcaggtgttttctaaggatagcagtttctggcctttatattaactcttctctgcagtcactacttcagctgttggtattttggtctgccatgtaatgagtatatgtaaggtaatggtacggctatttgtttatcctaacactgcttactaaatattctaacttttccctactagtttgaaatattttcttgatcatatacagaataaattgctgtaggtatttgatggtgttcctggattttactaactaaaattagaatctataatacagtaagcattcttttttttttttgtaggttccttgtttctatactgatgcagaaagacgatcagtgatggatgcaacacagattgctggtcttaattgcttgcgattaatgaatgaaaccactgcaggtaaggaggaccgttgattatttttttgacttggttaatcttgaagattgtgaaattttaaaaccctggggtttcttgctctttattttgctttcagcactgctgctcttgcttaccactgtggtcatggtgtttttggatactgtgtcacttgtgaagaattaatctgaccagtgctttttgtgtacctttatagcatgcattttggtatttaaacacatgcttgttggggaaggagaacacttagcgtgtggagcagtgctttgggttaaagactggtcttctcttagacttgtggactggtagagtcagaggaatgggacattaagcagcatctcatggacagaacatgcggggatgttaacatagcataggggtagaaaagatccaggaaaatatatttggaaaatgggggaaatggcttggagaaaattatgccaaagtccattggcaactgtaaggaagtctaagtgaatatcagtatttaactcttggaagataatctttttcttgaataaattatacagtgcttataaagaatttgatttctaaaacataacacatgtagttgcattcgttatatataaaacctcttttttcctgcttaaatgaattttatttacttagacgttatttttaatttttgtgttttttcttctgtagttgctcttgcatatggaatctataagcaggatcttcctgccttagaagagaaaccaagaaatgtagtttttgtagacatgggccactctgcttatcaagtttctgtatgtgcatttaatagaggaaaactgaaagtaagtatatattttttttccagaagactgttagtagtatggtaattatgaaattttgagagacaatgattttttctcatctacaatatgggagaaacaatgcataccttacagggttattcagaggattttttttcttttctttcttttttttctcttttttttttttgagatagagtttcgctcttgttgcccaggctggagtgcaatggcgcgatcttggctcaccgcaacctccacctcccaggttcaagcgattctcctgcctcagcctccctagtagctgggattacgggcatgtgccaccacgcccggctaattttgtatttttagtagagacggggtttatccatgttggtcaggctggtctcgaactcccgacctgaggtgatccacctgcctcggcctcccaaagtgctggcattacaggcgtgagccacggcgcccagcaggaggattttttaacatgtagttccttggtgaattttacactggggattgagagggtggtacaggtgctctgtactcttgctcatgaggttttgagtgttctggaaaaggggtttcttttggatgccaaaacaaactggactaggaattatagatttctagaaagcctaaagtttaagcagttttgtacacacagaagtatagaaggcaaggaggggccagagggtgattgatctctgtcatagttgagtttgctggtttatgctagttccacagtagggtataaaattctctgtctagatgattttatctagaatttggtgaagaaccaaggatttctcaagtgtttgctttaattatttgaattgtatattaaaattgttggtgccaaggtctgaattgactgccttgtacccattggagattggtggagagggattaccccaaactaaatatttggtaattttggaggcattttgagacttcatttgttatggtcttgtttctttgaaaaatagacgtttccactttattttctggttttatattgtttctaggtggttttgtttttaaataaaaagaaagcgagtcttttagataattgggaaatgagagatttgtgattttgctttttgacagctataaatggtggaccaaatgtaattctcagtgtttaaactttaatcactaatagaatttctaagatctatgctatgctttcatctttttaaacggaagactctggttataatttagcctggctttggatcagaacgatgtgtattagtagccatctgcttctgtttttctaaattgtccttctgtgttacctgtcacctgtcagttttgcaatccttttgattacttttaaattataaaaatattcattacaaaaatctccccaaattggaaaacatttatgtgtaaagacaagtctgggcaacatggtaaaaccctgtctctacaaaagttagctgggtgtggcggtgtgcttgtagtcctagctactctggaggctgaggtggggggattgcttgagcccggagtttgagaacagcctgggcaacatggcaaaaccccgtctctacaaagaaaatacaaaaattagctggatgtggtgatgtgtgcctgtagtcctagctacttgggatgctggggtggcgggattgcttgagcctggatggtcgaggctacagtgagctgagattgtgccactgcactccagcctgggcaacagagtgagaccctgtctcaaaaaaaagaaaaaaaaataaagaaaagttacttacaatcttaccattcttaacagcttgatgtatttcattctaattttctaagaaaacagaattggagtcactatatttagctctgtgtcctgtctttttttaagttaacatactaagaaaatttcccccatgacgtgtagcattctttgaagagattgtttttactggttttattccttcataaggatgtcatcacttatttagcctaacttctattactgaatctaattagatctagtttgcttctaatctgttagagatttgaaaacgggtaacccaggctaattagacttccaggttaaatagaaacacattgcggtgagctaaggctttaaggaatcctttggtagtaaactgcagagagttgagcctttggtattactcagttttgtgatactgagtagactagaagtatgtacatgacatgttagtatattttaccttggacatgtaactgctattggttgtcagactggtgtagtggggagggcatggactttggaattaaggagatttggctttgaattccacttctaccacttagtagctttgtgaactgcagtttatctcatctgtctaggtctgtagcattatctgtaaattggggattatagtgcctatttttacagtgtggggtaataaggattaaatgatgtatacattgctttgttttaaccttaatgtaaccctccctctttttttttagataaacaacttaccaggtaaatatatatcatctgtttcaaaatcgattggttaattgttagattaattctcattttttccttaaggttctggccactgcatttgacacgacattgggaggtagaaaatttgatgaagtgttagtaaatcacttctgtgaagaatttgggaagaaatacaagctagacattaagtccaaaatccgtgcattattacgactctctcaggagtgtgagaaactcaagaaattgatgagtgcaaatgcttcagatctccctttgagcattgaatgttttatgaatgatgttgatgtatctggaactatgaataggtaagtatattactatttcgatgttaaagtgaagagtgagttttctccacatatattaacctttaattggctaattgttaaaataatcacggaggttatatgataattttggttctattttaaaaattagaagccattcaggaccctgctttttatgtaaagttgggtctggttaataatgtagactaatgtttttgttctgataaattgaatattccaacatgttgatagttctttacatatgcatttgttatacacgagatttcagtttccaaaaaatcagggcaaagggctgtaatgcagaattaaattgaatttaatttacccagtgactaagaaattgtaattttttttttgagatggaggtttttgctgttttgcccaggctggagtaaagtggcacaatctcaactcactgcaacctccacccccaggttcaagcgattctcctgcctcagcctcctgagtagctggggttataggtgcctgccaccacgcccagctaatttttgtatttttagtagggacggtgtttcgccatgttggccaggctggtctcaaactcctgacctcaggtgatccacccacctcagcctcccaaagtatgaggattacaggtgtgagccaccgtgcctagcccgaaatttttctttttgaaatattcgggttcacttgagggtgacagctctttttgtatagtgctgcaagaattctgggtaattgacatttcggggttatcctcagaaactacccagagtgttattgttgcctggttcagttgcttggatgatgggagtaagatgttcttttggctgtgaactctactggtagaattcaggcaagactgatggtgtatttggagacatgggcctgagctatccgtaaaaaaattgaaatggtgtttattgttgctttgtatccaaatttttagtcacctctccccctacttggaagagatggctttcgtttttgttaagcagcagtcttgtgtgtgtgtatgtgtgttccatgaagtctggaggtaagccagtatgtttaagaaattgttagtgaaatgttacgtgtttgtaagagctaagtagatacttattaagtagtttaaattttttaaaaactgaatttgcctgtgtgctgttgtttgaaaatagttgtggcctggtacggtggctcacgcctgtaatcccagcagtttgggaggcagaggcaggcggatcacgaggtcaggagattgagaccatcctggctaacatggtgaaaccccgtctctactaaaaatacaagaaattagccgggtatggtggcgggtgcctgtagtcccagctgctggggaggctgaggcaggggaatggtgtgaacctgggaggtgtagcttgcagtgagctgagatcgcaccactgcactccagcctgggcgacagtgagactccgtctcaaaagaaaaaaaaaaaatagttgtactgtgatggggcatggtggctcactcctgtaatcccagcactttgggaggcaggtgcatcacttgaggttaggagttagagaccagcctagccaacgaggtgaaactctttctctactaaaaatacaaaaactagctgggtgtggtggcaggcgcctgtaatcccagctacttgggaggctgaggcaggagaatcgcttgaacttgggagatgaaggttgcagtgagctgagatcgtgccactgtactctagcttgggcaacaaagtgagacactgtctccaaaaaaaaaaaaaaaaaaaaaagttgtactgtatttacatcatcagaatacgtagctcttatatgttctatattatagccttcatttagtgtgattattgttgttgttatttttttgagacaggatcttactctgtcacctaggctggagtgtagtggtgtgatcttggctcactgcaccctctgtttcctgggctcaagtgatcctcctgcctcagtctcctgagtagctgggactacaggcacgtgccaccacgcctggctaatttttgtattttttgtagagactgggtgtcaccatgttgcccaggctggtcttgaacttctggactcaagtgatctgcctgccttagcctcccaaagtactggggttacaggcacgagatactgtgcctggcccccttcatttagtcttttaacattcacctttgtttaaatcgatgaaaccagattatttgacattatatttcttttaattaatggtttcttcacttaaaaacttgaggtgaaattcaagtatcataaaattaagcattttaaagtaaacaattcactggaatttagtaaattcacagggttgtgcaatggccacctctatgtaatggaaaaacattttcatcaccccagaataaaacttcatacccagtaggtgattatttcctgtttccccttacctctggtccctggtgatcaacagcctgttttctgtttctgtggatttatctattctggatatttcatataagtgtaatcatgtaatatgcgtctggcttctttcgttctgacttctcagtgtaatgtttttgaggttcatccacattctgtatcagtacttaatttgtttttttgggcagatattattttcttgtatggatataccatattttattcatccattcgtttgctgatggacatttgggtttctactttttagctattgtgaatagtgctatggacatttgtgaacaagtacttgttttcaggtcttttgcttatatacctaggagtggaattgctggcttatacagcaattctatgtttaactttttgaggaatctccaaactatatttctcagtgattatccccaccagcgccctactgggtttcagtttctccacgtctttgtcaacacttattttcaattatttggattattttggtagattactagtagctttgtgttaattcatcgttttgatggttggaagtgcattctcctgcagattcctaagggatagcacatgtgaatagtgttccttaagttcctgcatgttgatgacagtttgccatgtttatacttaaaagtcactttagctggatagaacattcttagcttttctttccttgttgaggatcttaaatgcagtaacaatctattttcttttggtgtataatattgctgtcaaagtgtgacagcatagtttttagatatttgtcacttgttctttttgcttagatgcccaaatgtttttgatttttttttttcttgaaagtccatttgggtgtggtggctcacacctgtaatcctagcactttgggacgtcgaggtgggcggatggcttgagctcaggagttcgagaccagcctgggcaacatggcaaaacctcgtctctactaaaaatacaaaaaagtagcttgatgtggtggtgttcgcttgtagtaccggctactcgggaggcggaggtgggaggatcacctgagcttagtaagtcgaggctgcagcgaaccatgatcacaccacattgcactccagccagggtgatgagagtgagaccctgtctcaaaaaaaaaaaaaaaaaaaaaaaacccaataattttactacactatattttgatgttggttattttgcatcagtttttttccaggtacgcagtgtgccttttcattatatagtttgacattacaaatttaagtttaattaaaatttcttaagttttcttgaattatgttttctagtattctgttgtagtgctgtggttttctcttttgggaattcctacataattatgttggatcttccttgcctatcttacatatatatatatttttttttagtttgccttttttttgtatttgccatttttggtccagtccttcatggcatttctcttgtgtactgtttagttttcatttctgacatttattcttatacttctaattctgttctaggtctttctaattctgatttgttctttcatttcctgtatcacttttattgagatataattcacataccataaaaccttactattttaaagtgtacaattccagggttgtgcaactgtgaccactatttaattctagaatgtttttatcaccccaaaaagaaaacttgtacccattagcatttactctccatttccctccataccctaggcaattaccaatatgttttctgtctctatagatttgcctgttcttttttttttgagacagagtctcagtaggtcacccaggctggagtgcagtggtatgatcttggcttgcttcaacctccacctcccgggtttaaatgattctcatgcctcagcctcctcagtagctggaattacaggtgggggccaccacgcccagctaattttcgtatttttagtagagatggggtttcgccatgttggccatgctggtcttgaactgctgacctcgagtcatccacccgcctctgcctctcaaagtgcggggattataagtgtgagtccctcttttgtttttgtgaaatattttaaaaatgtggcttaactttctgagatgttttccctccctcttttgtgtttactgtgttgttctgcttagtttggattttttaatcagtagtttttcttcagtgagttcttttttctttgaagataactttaggtagggcccagtttgctgtggttcctgaataccttatttgaggaccttttatacttgttttggaggatgccaaacccctgctgatttcagctgctgttttcaatttggctctctgagttaggttattctggagttttcaggtcaattatatacccttttgtttccttctgtttattttgtacagagctgatactaagcaggaattgtagttgtgggtggtttgtctctgcctatatgtattttgaggtttgtgggcatatttcattacctagttttgttgcaggattgtttaagcccaggagatggaggcttctgtgaaccatgattgtgccactgcgctccagcctgggtgacagagggaaagcctctcaaaaacaaaaccaaaaaaatctgcatcaaattatcacatcattcagcagttgtatttctagatacatattcaagagaaatggaaacacatgtccacagaaaaactcatatgtgaatgttcattgcactactcataatagacaaaaagtggaaacaacccaaatgttcatcaactgatgaagtgggtaaataaaacatgctatgttcatacaatgggatatttttggtacttgaaaaaaatgtaatacagatacatactaaaacatgggtgaaccttcaaaagttcacgctgctgaaagaagtcacaaaaggccacattttgtatgattctatttatatgaaatgccccgaattggcaaatctatagagacagaaagtagatttagtgattgcctagggctgtgggagttgaggaaagtaacagttaagggtgatgaaaatattcttttttagactgaaaatgttttaaaattgattgtggcgatgcttgcacaactctgtatatatgaagtcactgaattgtatactttaaaaatatttttgtaccaaaacctcatgcccaaaagtcaataattacatactttatttttatctttttaatttttaaaatttatttctttttgaaacaagttctcacgttgtcatgcagtctggagtgcagtggtactatctccgctcactgcagcctcactctctcgggttctagagatcctcccacctcagacccccaagtagatgggagtataggtgttcaccgacatatctggccaatttttgtattttttgtagagacaggattttgccatattgctcaggctggtctcagattcctgagctcggccaccctcctcagactcccaaagtcctaggattacaggtgtgagccacctcacccggacgggaattatatactttaaatgggtgaattctatagcatgtaaattatattgcaataaaactttttaaaaagaaactatcaaaaaacctctactgtccaggcatggtggctcacgcctgtaatcccagcattttgggaggctgaggtgggtggatcacctgagttcaggagtttgagaccagctggccaatatggtgaaaccccatctctactaaaaatacaaaaattagnnnnnnnnnnnnnnnnnnnnnnnnnnnnnnnnnnnnnnnnnnnnnnnnnnnnnnnnnnnnnnnnnnnnnnnnnnnnnnnnnnnnnnnnnnnnnnnnnnnnnnnnnnnnnnnnnnnnnnnnnnnnnnnnnnnnnnnnnnnnnnnnnnnccggaggctgaggtgggagaattgcttgaacctgggaggcggaggtagcagtgagctgagatcgtgccactgcactccagcctgggtgacagaatgagactccatctcaaaaaaacaaacaaacccctaccgctgttgccatcttcttaacaatcttttcctttgcttttcacaattttgatttcagatagtttcagacatgcaacaaagttggaagaattttacagtaaatgtcctcatcccaccacttagagtctactgataacatttactgtacttgttttattatatatttgttcatatatcctataaagccatcaatttttaatttttttattattattattttttgagatggagttttgctcttgttgcccaggctggagtgcaatggcatgatttcagctcaccttaacctccgcctcccgggttcaagtgattctcctgcctcagcttcccaagtagctggggttacaggcatgcaccaccacacccagctaattttgtattttttgtagagatgttgtttctccgtgttggtcaggctggtcttgaactcccagcctcaggtgatccgcccgcctcagtctcccaaagtgctgggattacaggtgtgagctactgcgtggcctggcctcaattttgtttttagcatatctcaaagtaaattgcatctgtatacttcttgcagaaacttaaattgcggacatctataaatgtagacttctccccaaatactaaggtttgcatattaaccagaattcattgttttttggatatatttttatatgacatactcaggttttaagtgctcatttgctgagtttcaacatacacatatatctttgtaactaatgccattattatgaaatagaccattatgttggaatgtttcctcaggcttccataaccactgatgtgctttttgtatttttcagtccctagattaagtttgccaattctgtaacttcttgtaagtggaatcatgtattatgtagttttttgtgtaaggcattttttagtcagcataaaattgagattcatttgtttgtttcacatgccatttgttgttcttctgtattgctaactactgtgccattgtaggtttgttgttattgatggacagtgactctttagcttttttttctattagaagtaaaacattttaaacttgaacatgtaagatctctggttgctacacatctcaccagtattgaggttagcaatccttaagttttgcatgctctggtgggtgcattctatactttactattctttttttttgagatggagtttcactcttttcgtccaggttggagtgcagtgtcctgatctcggctcactgcaacctctgccttccaggttcaagcgattctcctgcctcagcctcccaaatagctgggattacaggcatgcaccaccacgcctggctaattttgtatttttggtagagacgggctttctccatgttggtcaggctggtctcaaactcccgacttgaggtgatccacccgcctcagcctcccgaagtgctgagtttacaggcatgagccaccgcacccagcctactattcttttttattgagatgtaatttaataaagttacccacttttcccttttttttggagaaaggatacctattgcccaggctggagtgcaatgggttgatcatggctcactgtagcttcgacctcccaggcccaggtgatcctcctgcctcagcttcctgggtagctgagactacaggtgtgcgccaccatgcctggctaatttcttgtatgttttgtagagatggggttttgctgtgttgtccaggctggtcttgaactcctgggctcaagccttagcttcatgatgtgttgggactacaggcgtgagccactgcacccaactagaagtcacccttttaacgtgtataattcagcgatttaaaaaaaaatttttttttttttagtatgttcgtagagctcagcagccatcatcacaactaaattttagaacgttttcattacttcttaaaccctaaatgagtgagtaatcaggctgtgaaaagacattgaggaaccttaaatgcatattgccaagtgaaagaagccaatttgaaaaatctgcatactgtaggattccaactatatgacattttggaaaaggcaaaactatgcagacgaccgggtgcgatggctcatgcctgtaatctcagcactttggaaggtgaggcaggtgaatcacttgaggtcaggagttcaagaccagcctgaccaacatggtgaaatcccatctctactaaaaaaaaaaaaatacaaaattagccgggcgtaggtggtgcatgcctgtaatcccagcttctcaggaggctgaggcaggagaattgcttgaacccggaaggtggaggttgcagtgagctgggattgcgccactgcactctagcctgggcaacaagattgaaactccgtctgaaaaaaagccctgccgcccccgccccccaaaaaaaactatgcagacaataaaacagtcagttacctggagtttggagcagggagggatgaatagttggagcacagggagggatgaatagttggagcacagggaaggatgaatagttggagcacagtgaaattattctgtatgttactgaagtggtgaatacttacacattgttaaaactcataaaacactaataggaactatcatttatcagcattgactcattaattgtaacaaatgtaccatactaatgcaagatgttaatagaggaactgggctgggagtgaggaggggatgtatggggattcttgttatgttcatttctctgtagacctaaaacatctaaaaatgtgtattaatataaaagaaagagacatggttgtgcatgcctgtagacccagctacttgggaggctaaggtgggaaaatcacctgagcctgggaactcactgctgaggttgcagtgagagtgagccaagatcgtgccactgcactccagtctgggcaatagagttagaccctgtctcaaaaacaaacaaacaaaaaacaaactctgtactcattaggtgtccttcccatctcttcttcttcccttttgtcattggtagccgctcgtctcctttctctggatatacctattctgaatatttcacataaatttttgttcttgtttgactttaacccagcataatgttttcatgtgttgtgatatgtattagttcctcttattgtattcattcatttgtatcgctttatacagttgataggcatctgggttgtttcagctgcttgtgaacgttgatataccagttttgtgtgtgaacatgtgttttctgttcttttggctatatacctagaatggaattgctgaatcatatgctaactctctaacgtcttgaggaactgccaaacacttttcccaagtggctgcaccattttcattttctattacctgggaatgtatgaaggatccactgtctccacattttgccagcacttgttgttacctgttttttattatagccatccattccacataaaagtggcatgtgatttaatgtactgtgttttttgttttgttttgttttttatagaggcaaatttctggagatgtgcaatgatctcttagctagagtggagccaccacttcgtagtgttttggaacaaaccagtaagtatttttgtgattgaatttgtttgcgtatctcagactgtttggaaattgttatttattatcttacttttgcaagcagtgatagaaatttttattgtatgaactaattcagtggtatatattaaactttttttcaacctgtatcttccccctgcccaaagtaatcttttgaaatgtctagggaaatctaataaaagtttctccaagaaactgaattcagactgaaagttggatataagcctcacaattatttaatggtggtaaaaattgtcttttgcgatgctgatatggtagtcttataagcttttctgtcagtgaattcttccctagctggatgagagctacagcaaagtgggaaggtaggataaccacatacttatttaacaagatgctttaattttgtctcaggctaaaaggtgactgtttgatttaggaatatatactaattttcctaaaatctttctttgacaaaccatttacctggacttcactgttgtgttgattgctatttcagagtgttgggatatactgtcagcttggcacaggctttcctctttagtgatgatggcaaatgggcttatttccacactgggaaagcccatttctttaaatagcccttctcaagaagttatcaatggttgttagataaaatgtgaccaggaaatcaggtgatattaagaagtattttatgagcaatagcagatcctttgatacacaccttctttctgatacgaagaaactgtacctgtagtttattttttattttatttttattttttgagatgggagtcttgctctgtcacccaggctggagtgcagtggttcaatctcagctcactgcaacctccacctcctgggttaaagcaattctcctgcctcagcctcctgagtagctgggattacaggcatgcgccactacttctggctaatttttgtatttttagtggagacggggttttaccatgttggtcaggctggttttgaactcctgacctcaggtgatccgcccacttcggcctcctaaagtactgggattacaagcatgagccaccatgcctggcctctacctgtgttttaacgtggactatgtttatgccttggattagaacactggagtagctggatgtgattcttcttttttttcctttaatgtcaggtcagaataactcagtggtttgaggccctcttattttcctgatggctagcgtgtttgaatgtttggtctgttgatgttttaacacttgtttgtgtgagattgtgtgagaaattcaggacctgtacactgcagtacatttgaggattcctggccctcacctcctaaatcccactagctacccttcccccattattttgagaattaaaacacctacttgtttccagatgccacctgcctctgtgagtgtgggcatgagtatgtgtgtgttgcggaggtgggtgagggagttggaggagttttgttacacatctgagttatttcatcatggtaagatgttattgttctttcatttcattaaaaaaatctgtctaattctttaaaaatagagttaaagaaagaagatatttatgcagtggagatagttggtggtgctacacgaatccctgcggtaaaagagaagatcagcaaatttttcggtaaagaacttagtacaacattaaatgctgatgaagctgtcactcgaggctgtgcattgcaggtgaatattctttcttttataggtaaccatttataaatcattgtaacaagatggcagtggtttatgtatctaataacctgggattagctcagggtgacttcagggtgttgagattccaaaacctttgttttaaaatagaggtgatgttcctaaaaataattgtactctatagcacataagatgaattaattgactagaaacataggtaactctgagcctgaagtatgactggaagtttggcctgttatgtatgtctgtatgaaatagtgtacattaattaaataagggttggggttaatagaaaaataaggaatagctagattatataggtaattgacatgatagaagtttgtaaaactgttcagacaccattaaattactaatataaatattttaaaaagaccattgattttctgaagtaatttgtatgtttaagtgatattatcagtttatattgtctatacttgttaaacggaatttttgaaaattattattctagtgtgccatcttatcgcctgctttcaaagtcagagaattttctatcactgatgtagtaccatatccaatatctctgagatggaattctccagctgaagaagggtcaaggtatcatgtttattaatcatttacatatctaaagttaattgactattaggtctgagtaatatgttgcttttcatttcagtttacataaatctgtaacattttatcatagtgcatgaaggaagtggtcatttattttagtcagaataaatttgtgtccttaattagtttctcacacttgattctgctgaaatcatcagtgccttttatgtgcagattgacgtatattccttttttactgactttatatataaagattcttgggaactcttataatctggaaataataccaattgaaaagagagagaaactaacactgtacaataattacaaacctagaacacatgggtaaaagtgttaggaatatcctgaatttgtgtttttgtctttttcctccattcagtgactgtgaagtcttttccaaaaatcatgctgctcctttctctaaagttcttacattttatagaaaggaacctttcactcttgaggcctactacagctctcctcaggatttgccctatccagatcctgctataggtaagtaaagagttggaaattaaaaaagaaaaaaaaaaaaaagcacagtggctcacaactgtaatcccaacactttgaaaggctaaggtgggaggatcacttgagctgaggagttcgagatcagcctgggcaacatagtgggaccctgtctccatttaaacaacaacaaaaaaaagcttatctacttggagagttcgcatagtagaaagaacaagtatggtattctgaaatttaggggctttagattgcaaaagaaaacctcttccagtctcgttagcaggtttagaaccagccaaatggctgttatttaattggatctcccattgtatcggcagtttttcttggttagcgcacattgtaattataacttatgtataaggtggtgctatatactataaggagttaacgaaattcagtttggaccctaacatacagttataagatgtatatagaaaatagccaggtgcggtggctcacgcctgtaatcccagcactttgggaggccaaggcgggcaggtcaggagatcgagaccatcctggctaacatggtgaaaccccgtctctactaaaaaaatacaaaaaaaaattagccaggtgtggtggcgggcgcctgtaatcccagctacttgggaggctgaggcaggagactggcgtgaactcggtaggcagagcttgcagtgagctgagatcacgccactgcactccagcctaggcgacagagcgagactctgtctcaaaaaaaaaaaaaaaaaaaaaaaaaggatgtatatagaaaatcattaggagatggtgatacaatatcaaaacatactaggtttcagaaccgtgttatctagagtagttatagactctgggaaactcttatctggaaataatactagttgagaagagatagaaactagttatagtataaagacctagaatatatgggtaaagaaattaggagtatcctgaatggcatttagaagctgtggaaagttaacctattcttttttccccatctgtaaatctgtaaaaccaggaataacaatgataattcatactttgcagagttctgggaatgaagaaaatgtaaataaaaaccttgtacagtcactggacctagaaatggcaatttactgataaacgacaagcagagtggaatcattttttttttctgttttgttttttgagtagagaatgtgacaaatctgttttaggaattaatctgaaagtagcatataaagataaatggaaataagaaattggaagaaaggaaagaatcgggagatatttgagttcttaattggggcaggataagataataagagactgtgaaagaagaaagagaaatctgatgatttaataagattctaaaaggaccgatnnnnnnnnnnnnnnnnnnnnnnnnnnnnnnnnnnnnnnnnnnnnnnnnnnnnnnnnnnnnnnnnnnnnnnnnnnnnnnnnnnnnnnnnnnnnnnnnnnnnnnnnnnnnnnnnnnnnnnnnnnnnnnnnnnnnnnnnnnnnnnnnnnnnnnnnnnnnnnnnnnnnnnnnnnnnnnnnnnnnnnnnnnnnnnnnnnnnnnnnnnnnnnnnnnnnnnnnnnnnnnnnnnnnnnnnnnnnnnnnnnnnnnnnnnnnnnnnnnnnnnnnnnnnnnnnnnnnnnnnnnnnnnnnnnnnnnnnnnnnnnnnnnnnnnnnnnnnnnnnnnnnnnnnnnnnnnnnnnnnnnnnnnnnnnnnnnnnnnnnnnnnnnnnnnnnnnnnnnnnnnnnnnnnnnnnnnnnnnnnnnnnnnnnnnnnnnnnnnnnnnnnnnnnnnnnnnnnnnnnnnnnnnnnnnnnnnnnnnnnnnnnnnnnnnnnnnnnnnnnnnnnnnnnnnnnnnnnnnnnnnnnnnnnnnnnnnnnnnnnnnnnnnnnnnnnnnnnnnnnnnnnnnnnnnnnnnnnnnnnnnnnnnnnnnnnnnnnnnnnnnnnnnnnnnnnnnnnnnnnnnnnnnnnnnnnnnnnnnnnnnnnnnnnnnnnnnnnnnnntgggtttgtatgtttgcccttcccccaatataagtgaaccagcagtagatttttatgcagaatttgtatagaagtggaacacaagttgatttcttctttcagatcatacacttctcaacttgagttattcctgattctggttgttgaagagtgctctgagtctcagttaattattttcaaaagtagaattgattgtacactcatttgttggaattatgcactgggtcttgtcttcattgtgcatcagaatcaaagctttacaaaactacaaattacctatgattccagcactttgggaggctgaggcaggaagattgcttgagcccagaagtttgaggccagcctgggcaacaaagtgagaccctcatctctacaaaaagttaaaaacaacaacaacaacaacaaaaaaactagccaggtgtggtggcacacacctgtggtcccacctgcatgggaggctgaggcaggaggattgcgtgagcctaggaggtcaaggctgcagtgagtcctgtttgcgccactgcactctagcctatgtgtcagagtgtgaccctgcctcaaggaaaacaaaactacaaatgcttgggtttcatccccacagattttactgaagttggtctgagctgaggtagcagtagttttaaaagcctctcaggtcattctaatatgttgcaggcattgagaagccactggttcaggctctccacaaaccttctttcattgttatttttaggctttgtaattttaacgtgttcgcctccccgagcacatgcagtggtcatacttttgaggatgaagagaggctgacttaggaactatttgaaaaagttggaacttttgagagaaaatacctttgaggaagcctggagaagcttatgctctcttcaggttgtattttgtagattgtattaaatgatgccacattgtgaactgtgagtacttaatggtgtacaaagcagttccacagttattcttgtgtatgtaagggtagggcagggcgagtgttatcctcattgtacagatgtattaactaagatccagagcggaaaacttctgtgtcctaggtaatgtggcctacctggaattttagcataggccttctgattgctggtaattcagcaggaattacataactatgtgactttgtcaatgtgtaatgaaggttgtttagtcttcctaattgcaggatttaatttgacctgtttttcagaagatgcaagtggaccaggaggaaccacatgttgaagagcaacagcagcagacaccagcagaaaataaggcagagtctgaagaaatggaggtatgcattgggtggtgtttttttttttttttttttttttttttttttgagacagagtttcagtctgttgcccaggctggagtgcagtgacatgatctcggctcgctgcatcctccacctcctgggttcaagtgattctcctacctcagcctgctgagtagctgggattacagacgcccaccaccacggcagctattttttttttttttttgtattttttagtagagttagggtttcactgtgttggctaggcaggtctcgaacttctgacctcaggtgatccacctgtcttgtcctcccaaagtgctagtattacaggcgtgagccaccacacccggctgagttgtgttttagagtatgcactgcagtctttttaaagtacatggttttggctgaggggcagtgtcttgaaagatagttatactagaaactcttaatttatttgaacaatttttttaggaagattttgtagtgatttgtaatgtgctatttgcaagatggcctttaaactctctcctggttgatacatgggaagaaagcactcaggaatcctagttttactaggctagtgatttatttatgctagtttctgaatggcttatactaagtctttctacccataatttaattcattactgataaacaataatgaaactgaaaaaattttcaaaatcatcaatgatccatgccttttactttttaatctttttatttttttgagatgnnnnnnnnnnnnnnnnnnnnnnnnnnnnnnnnnnnnnnnnnnnnnnnnnnnnnnnnnnnnnnnnnnnnnnnnnnnnnnnnnnnnnnnnnnnnnnnnnnnnnnnnnnnnnnnnnnnnnnnnnnnnnnnnnnnnnnnnnnnnnnnnnnnnnnnnnnnnnnnnnnnnnnnnnnnnnnnnnnnnnnnnnnnnnnnnnnnnnnnnnnnnnnnnnnnnnnnnnnnnnnnnnnnnnnnnnnnnnnnnnnnnnnnnnnnnnnnnnnnnnnnnnnnnnnnnnnnnnnnnnnnnnnnnnnnnnnnnnnnnnnnnnnnnnnnnnnnnnnnnnnnnnnnnnnnnnnnnnnnnnnnnnnnccagcctggccaacatgggaaaccccgtctctactaaaaatacaaaatttatcccagtggggtggtacacgctggtagctccagccacccaggaggctgaggcatgagaattgtttgaacctgggagatggaggttatgtgagctgagattgtgccactgcactccaatttgggcgacagagcaagactccatcttaaaaagttattttaaataatggaataatggatttaaatatattttgtgattaatgtaaataatgtatttatttcaaaaagagtagtaacatttttgaatcctttacaacctattctttaattttgagttgtcatgtttaaatttttttatcattgaaaatatcttttatttataaaattacaatgtataatctcaccatcttaggagtttctaattttaaaaagtttctaatttttacaaatttctaatttaaaagtgacatttaaaaaagttggacagaaccttaaagtggcttaagtccgttgtatattttcatgtcaattaacaaaatttaattgcttttctttagctgtgcaagtaatattaaaaaggaaaatggacaggaaatggtgcttacagattctttagttgggtcaggcctttttcaagatggaagaccctttatgttgttgggtgggatgggggcagcagtggcagagacaaggacttgttctcctatatgtttgtggaaggtgggtgaagagaagggagaagtgacggctgcttccccaatgcctttgagctgtgggagggggttttagaggtattagttatctaggcttccttgggatggctcagaaactaaagtgccttttgcatagcattgcttctaaaggcaaatgaaatagaaatgatagataaatttcagcagccgacttaagttagttataggaggtgggaaatgacattaaggttttgctttatcatagaacaaattgaattccagatgaattctaaagttgaaagttgaaaaagcttgaagtgaatatttttctaatctgtggatgaggaagggctttcagagtatgaaagcaacataagtaatctcaaaggaaaagatggatagatttgacagtcaaaacttatatgtagacaaataatacagttagaaaaaactagaagagtcgctgtggctcacacctgtaatccagcactttgggaggctgaggcagcggatcacctaaggtcaggagttcgagaccagcctagccaacatggtgaaaccccatctctactaaaaatacaaaaattagctgggcaggagcctgtaatcccagctactcaggaggctgaggcaggagaatctcttgaacctgagaggcagaggttgcagtgagctcagattgtgccattgcactccagcctgggctacagagcgagactccatctcaaaaaaacaaacaaaaaaaactagaagagtcagttgtttgtgggggaaagaaacactgcaatcctaagagaagagtggataaaatattactaggcagtttgaggaaatagttacatatggcttgtaagtgtctgaaaaaggttaaaagaaactcatactgaataacagtgagatgatgttaaatgaattctcatttgtggacagggtgcagtggaatgagttttttccttgtgagaatataaatagttacagacattatagaaatcaaattaccaatatgttactactgatccatagatatttcataccctcctcctcactaacttcatttgaatgtctatatgtttaaataaaggtagaaaaatttttaatagtaattatatattgatacgggattgtaggagatatgtattttataaaatttaccatcttaactgcttttaagtgtaccattcagtagtgttaagtagatagacattgtggtgtaaccaatcttcagaacttcatcttgaaaaactgaaactctatacccattaaataactttccattattcccctcccccatcccctgacagccactattctgcttccatttttatgaatttgactgctctagatacctcattgtatttacttattttttattttctagatgttatggtagtcctaagttacttagatcatcatcaaaagagaacgaagtaaaaaaagcaaaaacagttttccaacatgactcattttgaagtttaaggtagtctgtatatgtgtttgttcttaatgatttctattgttttagacctctcaagctggatccaaggataaaaagatggaccaaccaccccaagccaagaaggcaaaagtgaagaccagtactgtggacctgccaatcgagaatcagctattatggcagatagacagagagatgctcaacttgtacattgaaaatgaggttgttatttaaagtctattggaacaatgagctaacaaattaatgttaccatagtattcagactctgtgtctagtgactttttgcatttttgattgtttggacttagagaaaataaattagacttttgtgtggtattgtaagggcaagttgaagcaatagatcccatgttatgtcaattcttttatggtggtactaagatgtctgtattgctagaagctctgttatgaaaattttgacatataatgtctttggtgtaggggaggtattgttcatttttgaatacgtgggtatatttgttcactagagattgggatatttgaggttggtggtcatggaagttattcagtaggagaaatcgtatggcattaatggtggcagtattttgcttattcctttccgttgccagtcagtatgtaaatatagtaactcttactgagtgatgcaaggtttgggatttgtgagcacatttattgaattaatttttgtctatgaggtttcttaccaggtttccactggatcttagaatagttttgtcttatggaaacttcagcatttatactgcgtgaatgaatttgatttttcttatctcatattaatacagcagaggatatcacttagtgacattgaaccaatagttttttaaatttctcttgtcttaaattctttaattttgcttttgagtgtctacaccttgatatttctattgttcttttttttaatcccacctacaaaactctttttgatattcaaagtctgtcaaggattagtcttcccacttacctttgttatgtgacttgcagaactaaaaggatttggggaagaaagagtctctacttttataattatattggtatttaagaggaaattagttgtcctaatgtctgatttatacataatatttattctcagggtaagatgatcatgcaggataaactggagaaggagcggaatgatgctaagaacgcagtggaggaatatgtgtatgaaatgagagacaagcttagtggtgaatatgagaagtttgtgagtgaagatgtaagtctgccacaatatgcctaactactgtgtgtcttctgtgaacatctttaagtgggttagaagggaagtgtgcagctatatgtgtatagtagaattattaaaaatggagtttttctggggggggcaaaattttatatttttttatatatttctctattagtacagtgtttagtaaggtttggtctttgtgcatcacgttcacaaatcacttttgacacattcgaatattgttatttatcttgtatctttcttttcttttcttttttttttttttttgagacagagttttgctcttgttgctcaggctggagtgcagtggcgtgatctcggctcactgcagcctccgcctcccaggttcaagcagttctcctcccccagcctcccgaatagctgggattacaggcatgtgccaccaagcctggctaatttttgtatttttagtagagatgggatttctccatgttgatcaggctggtctctaactcctgacctcaggtgatccgcccgccttggcctcccgaagtgctgggattacaggtgtgagccactgcgcccagcctgtatttttctttaaattgttaaagctcactttttcctgtttattgtaactcagaatttttagtttttttttttttttaatttgaatagctcttgggtacaggtggtttttggttacatggatgaattatatagtggtgaattctgagattttggtgcacctgtcatccacgtcctgtacatcatacctaagatggtagtttttttatcccacaccccacttctgtcctcccgcttttgagtctccaaagtccattatatttctgcatatgctccatagcttagctcctacttataagggaaaacatagcagtatttggttttccattcccaagttacttcacttagaataatggcctccagctccatccagttgctgcaaaagacattattttgctactttttatgactcagtagtattccatggtgtgtatataccacgttttctttattttatttttattttttatttatttatttttgagacggagtctcgctctgtcgcccaggctggagtgcggtgacgcgatcttggctcactgcaggctctgcctctcaggttcacgccattctcctgcctcagcctccggagtagccgggagtacaggtgcctgctaccacgcctggctaattttttttttttttgtatttttttttagtagagatggggtttcaccgtgttagccaggatggtctcgatctcctgacttcgtgatccacctgcctcggcctcccagagtgctgggattacaggcgtgagtcaccgtgcccggtctaccatgttttctttatttactcattggttgatgggtacttagttgtttttatttttttatttttttgagatggagtttcggtcttattgcccaggctggagtacagtggtacgatcttggctcactgcaacctccacctccctggttcaagtgattcttctgcctcagcctccctagtagctgggactacaggcatgctccaccatgcctggctaatttttgtatttttagtagagacggggtttcaccatgttggccaggctagtctgtccttacctcaggtgatccacccgcctcagcctcccaaagtgctgggattacaggcgtgagccagtgttcccagatgcacttgcttttacatgcagtttttattctgaaattttttaacttaccgaaagccctccacggcagggagaataatataataaaactccccatacctatcaagtagaccaacatttgccatccttgttttctgtatctcccatctccttactccccctgtatcttatcttattttttttgaaatggagccttgctctgttgcccaggctggagtgcagtggccccatcttgggtcactgcaacctccgcctcctgagttcaggcagttcccctgcttcagcctttgtagtagctgggattacaggtgtctaccatcacgcccgggtaattttttttgtatttttagtggagacggggtttcaccatgttggccaggctgttcttgaactcctgacctcaggtgatccacctgcctcagcctcccaaagtgctgggattacaagtgtgagccactgcacctggctgccctctgtattttaaagcaaatctcagatacatcattatattctatgcctctgactgtattggggatgtaatttttgattgacctaattataatattttctttatcattaggatcgtaacagttttactttgaaactggaagatactgaaaattggttgtatgaggatggagaagaccagccaaagcaagtttatgttgataagttggctgaattaaaagtaagtgactcttgagagcagaggtatccagaacccttgttgaagcttcctctgaggagctcaaatttgggaggaattctcaagtaaagacagactgaaaatgatgtttgatgaactaaaataaaccctttatgacttaggctcattatcattctcacttttagaaccttgtaataacaaaatgatttttctgaaaattgactttaggtttgtaatgtttcactgaattggatgtttagtgcattcttggtgtcaagagataaaatgactgcaagacttagtacctgccctaaaggcacagggaatgcagctggagcagggctgtttctgtttatgtagtttggattcttgataaaagcaaagcatctggtggtttattttttattattttatttatttattatttatttattcatttatttatttttaaatacacagtcttgctctgttgcccaggctggagtgcagtggcgcagtctcggctcactgcaacctctgcctcctgggttcaggggattctcatgcttcagcctccagagtagctgggattacaggcgcgtgccaccatgcctagctaatttttgtatttttagtagagacagggtttcttttcaccatgttggccaggctggtcttgaactcctgacttcaagtgatctgcatgccttggcctcccgaagtgctggaattataggtgtgagccaccatgcctagccaaagcatctggtttnnnnnnnnnnnnnnnnnnnnnnnnnnnnnnnnnnnnnnnnnnnnnnnnnnnnnnnnnnnnnnnnnnnnnnnnnnnnnnnnnnnnnnnnnnnnnnnnnnnnnnnnnnnnnnnnnnnnnnnnnnnnnnnnnnnnnnnnnnnnnnnnnnnnnnnnnnnnnnnnnnnnnnnnnnnnnnnnnnnnnnnnnnnnnnnnnnnngtcggagatcgagaccaaggtgaaaccctgtctctactaaaaatacaaaaattagccgagcgtggtggcgggtgcctgtagtcccagcatctgatcttttaacattaggattaaacatgaaagaattacataaaattgaggccttttgttcagaaaaggttgcagatgcacaagaatgaactttttacatttctctttaaatttagctctggattacttggtttcttgtggaactgggccattttgaatctcactctgtcagtcgggctggagttcagtggtgttatcacggcttactgcagcctcgacctcccatgctcaagtggtccttctgccttagtctcccaagtagctaggactacagctgtgcgccatcacgcctggctgttttaattttttttgtagggaaagggtctccctgtgttgcccagactggtatgggtactcctggactcaagcaattctcctgccttggtctcccaaagtgctgggattacaggcatgagccaccgaacctgaccaagcacatcttaatatcactgttgtattaagttttcaagttccagttatttcataaatgatttttttgtttgaatcagtatccgtatagggctcatagattttattgatgtcgcttataactgtgtctatagttcttcttccgttatttccccatgtcgccccaccctttccttatttagtttatgaggaaattggatcattggtcctgtaggattttcctctagttggattttgctgattttcacctccctggtggtatttaacattatttgttaaattgatggttacatttagaggctccatcagattcagatgtttaagattttaaattaaaacattttttatttttggcaagtatactttatatttagtactgtgtatctccattaggaggcacctaatttttggtggtctccctgctgtgttttgagggctcaggtgacaaattgaagcgattccagatggatcagtgttgaggtatagtttcattcccctcctgaagtagcttcatatttccaaaggcctggagaaatatatttaacttcttatatatagcacacggagattaaatgtactttatcactagttttagtggaatcagtactctggatcgttgaactgccgtatgaagactgtgtattcttctgttaagaatctaggtcaacctattaagatacgtttccaggaatctgaagaacgaccaaaattatttgaagaactagggaaacagatccaacagtatatgaaaataatcagctctttcaaaaacaaggtaacttttttctttgtcctactcttattttagtaaagttaactttttttttttttttttttttttgagacggagtgttgctcctgttgcccaggctggagtacagtggtacaatctcggctcagtgcaacctccacctcctgggtttaagcaattctcctgcctcagcttcccgagtagctgggattacaggcgtgcaccaccacgcccagcttatttttgtatttttagtagagatggagttttgccatgttggccaggctggtctcgaactcctgacctcaagtgatccacctgccttggcctcccaaagtgctggctggtattacaggcgtgagccactgctcccggccgtaaagttaacttctgaggcatttacatagcatttttttctcttgttctcattaacttgtttaatagcactttttattttggatattaatgtaatgtgtaatgttttatagcgtcttaataagaaccataggatttgctgtatctctttaataggtggaatctggaattgaacagtgttgttcagtttccttttcgttggtgtttgacttaacatgcactatcctggtctttctaacacctgaggccagtaattatccacacagtacctttataaggtagggggtggtatcaacatttatagataaattccaacttattgaagcctcactttccttaagcaacattcagggtcactaaattgggagaactgtcatttagccagaagtctgactccaaagttcagactttggagtataaagttcctccattataccccaggttcttgacatattgttagtgtaagaaactttgaatgataaattgagcttttgtgggtttttgtttgtttgtttgtttttgtgttttgacaagttctcactttgtcacccaggctggggtgcagtggtgaaatctcggctcactgcagcctcaatctctctgactcaagcagttctcctgcctcagctactttctaagtagctgggactataggcacgtaccaccacacccaactagggttgtctttttttttttttttttgagatggcatttcaccatgttacccaggctggtcttgaacttcttagctcaaatgatccacccacctcaacctcccaaagtgctaggattataggcattagccatcaggcccctcctttttttgtttttttttcctccttcttttttgtgagacagggtctcagtctgttgcccatgctctagtgcagtggtgtgatcgtagttcactgcatcctcaacctcctgggctcaagtgactgtcctgtctcagcctcctgagtagctgggactataggcacatggccctcatgcctggctaatttttgtattttttgtggagatgggctcattgtgttgtccaggtcttgaagtcatgagcttaagcgatcctcctgcctcagcctcccatagtgctaagattacgagcgtgagccaccacgcctagcccgaaaggccttcttcttcttttttttttttgagatgtagtctcgctctgttgcccaggctggagtgcagtggtgtgatctcggctcactgcaagctccgcctcctgggttcacgtcaaaggccttcttttaaaaatagtattcattatagttttggttccgaactagcatgctgaaacttcagctctcatatctaatgtaatttttttgcattgtgaaattatcttcctaagattttgtataaatcgggtgctgctgtttatcttgttgaagccttttaattgataccttatgaattttcttgacctttaaaatttaaatctatcctgagtgtattcaaaaattgtggttaggtttcttttgaataattctgttcagattgtgaggctaaatatgctttattttttgaaagattataagtttttgaaaaatggcagaaactagacagtagttgcggggagggagggtatcacacttttagcacttgtttgactgtctcctggttgcaggaggaccagtatgatcatttggatgctgctgacatgacaaaggtagaaaaaagcacaaatgaagcaatggagtggatgaataacaagctaaatctgcagaacaagcagagtttgaccatggatccagttgtcaagtcaaaagagattgaagctaaaattaaggtaatttaagacttttttttaatagtcttttcttgacagccttattattaatagtcctcaagtgacacttaggagggaactttattatagtgttttagcttctaggttgaggattgggtggtgggagagggcggatttgggtttagcatggcttgtaaaatttgttaattttataagaaaccagttttctgtcttacccattccaggagctgacaagtacttgtagccctataatttcaaagcccaaacccaaagtggaacctccaaaagaggaacaaaaaaatgcagagcagaatggaccagtggatggacaaggagacaacccaggcccccaggctgctgagcagggtacagacacagctgtgccttcggattcagacaagaagcttcctgaaatggacattgattgattccaacacttgtttctattaaaacagactattataaagctttaagttgtcaactttgttctaaatatcaactagcgcaagtgaatactgaagatttcttagtcagtttttaggggattttcggggaggggaaataggtaatgtatggagcattttcacttctaaatagttagatacagaaattaagtgcattgtatctttttcataatggtactatttagaagcccagttagtcttactgagcttatgcttcactcctttatgtttaaccatgtgtctacaagaataagtttgttttggaaagttgagctatagctacagctctagctatccagcagacttttcattatgacttacatggcaggagctctaattatgctttaaaaatctgttgtggagattgctttaaatgctccctgcctggtgtggggatggggtccccctctttgtgagggctggagcatggcacggcatggattaacacggcagaggaacaaaggtgtgctctgagcttcttcatatttcaccttcaccctcacctgtgttctcttccctctctcccaataaaagggctcccattataaatgccatgtacttctcttgggaaaatagacccccttgcctagagtaagttgttaactgagggctttaaacctggaggctcttcctgaaagtatgttcatgaataccccaagcatcaaggtctaaataattttcagaagattagaattgggtagatatactgttggatatagccatggtaaatttaactgaggaattaaatccttgttaattttggtgtaaagatttgtatcctggcctgtttattcaggtgggagatgttctgtataattttgaggtatagcttgaactcctagaacaagagttaaaagttctttttagctcattcacaatcacttgtgtgttaagtgttaatatctgtcatgaacctgccaatttgtacgtgttaagcagctgacagatgatgcaaaaaaaactaagatacactggattgtactggatgagtctgaaattagtgttaaagaagtgtggtgcctgatgttataacaacacctcattcttaactgtgtggccaatgtcaggtataccaaagcattcctctgactgctttttggggcagtgttgacaggagtgaggcattttggaaactccaagggaagcctgtgtttgaggccagagttnnnnnnnnnnnnnnnnnnnnnnnnnnnnnnnnnnnnnnnnnnnnnnnnnnnnnnnnnnnnnnnnnnnnnnnnnnnnnnnnnnnnnnnnnnnnnnnnnnnnnnnnnnnnnnnnnnnnnnnnnnnnnnnnnnnnnnnnnnnnnnnnnnnnnnnnnnnnnnnnnnnnnnnnnnnnnnnnnnnnnnnnnnnnnnnnnnnnnnnnnnnnnnnnnnnnnnnnnnnnnnnnnnnnnnnnnnnnnnnnnnnnnnnnnnnnnnnnnnnnnnnnnnnnnnnnnnnnnnnnnnnnnnnnnnnnnnnnnnnnnnnnnnnnnnnnnnnnnnnnnnnnnnnnnnnnnnnnnnnnnnnnnnnnnnnnnnnnnnnnnnnnnnnnnnnnnnnnnnnnnnnnnnnnnnnnnnnnnnnnnnnnnnnnnnnnnnnnnnnnnnnnnnnnnnnnnnnnnnnnnnnnnnnnnnnnnnnnnnnnnnnnnnnnnnnnnnnnnnnnnnnnnnnnnnnnnnnnnnnnnnnnnnnnnnnnnnnnnnnnnnnnnnnnnnnnnnnnnnnnnnnnnnnnnnnnnnnnnnnnnnnnnnnnnnnnnnnnnnnnnnnnnnnnnnnnnnnnnnnnnnnnnnnnnnnnnnnnnnnnnnnnnnnnnnnnnnnnnnnnnnnnnnnnnnnnnnnnnnnnnnnnnnnnnnnnnnnnnnnnnnnnnnnnnnnnnnnnnnnnnnnnnnnnnnnnnnnnnnnnnnnnnnnnnnnnnnnnnnnnnnnnnnnnnnnnnnnnnnnnnnnnnnnnnnnnnnnnnnnnnnnnnnnnnnnnnnnnnnnnnnnnnnnnnnnnnnnnnnnnnnnnnnnnnnnnnnnnnnnnnnnnnnnnnnnnnnnnnnnnnnnnnnnnnnnnnnnnnnnnnnnnnnnnnnnnnnnnnnnnnnnnnnnnnnnnnnnnnnnnnnnnnnnnnnnnnnnnnnnnnnnnnnnnnnnnnnnnnnnnnnnnnnnnnnnnnnnnnnnnnnnnnnnnnnnnnnnnnnnnnnnnnnnnnnnnnnnnnnnnnnnnnnnnnnnnnnnnnnnnnnnnnnnnnnnnnnnnnnnnnnnnnnnnnnnnnnnnnnnnnnnnnnnnnnnnnnnnnnnnnnnnnnnnnnnnnnnnnnnnnnnnnnnnnnnnnnnnnnnnnnnnnnnnnnnnnnnnnnnnnnnnnnnnnnnnnnnnnnnnnnnnnnnnnnnnnnnnnnnnnnnnnnnnnnnnnnnnnnnnnnnnnnnnnnnnnnnnnnnnnnnnnnnnnnnnnnnnnnnnnnnnnnnnnnnnnnnnnnnnnnnnnnnnnnnnnnnnnnnnnnnnnnnnnnnnnnnnnnnnnnnnnnnnnnnnnnnnnnnnnnnnnnnnnnnnnnnnnnnnnnnnnnnnnnnnnnnnnnnnnnnnnnnnnnnnnnnnnnnnnnnnnnnnnnnnnnnnnnnnnnnnnnnnnnnnnnnnnnnnnnnnnnnnnnnnnnnnnnnnnnnnnnnnnnnnnnnnnnnnnnnnnnnnnnnnnnnnnnnnnnnnnnnnnnnnnnnnnnnnnnnnnnnnnnnnnnnnnnnnnnnnnnnnnnnnnnnnnnnnnnnnnnnnnnnnnnnnnnnnnnnnnnnnnnnnnnnnnnnnnnnnnnnnnnnnnnnnnnnnnnnnnnnnnnnnnnnnnnnnnnnnnnnnnnnnnnnnnnnnnnnnnnnnnnnnnnnnnnnnnnnnnnnnnnnnnnnnnnnnnnnnnnnnnnnnnnnnnnnnnnnnnnnnnnnnnnnnnnnnnnnnnnnnnnnnnnnnnnnnnnnnnnnnnnnnnnnnnnnnnnnnnnnnnnnnnnnnnnnnnnnnnnnnnnnnnnnnnnnnnnnnnnnnnnnnnnnnnnnnnnnnnnnnnnnnnnnnnnnnnnnnnnnnnnnnnnnnnnnnnnnnnnnnnnnnnnnnnnnnnnnnnnnnnnnnnnnnnnnnnnnnnnnnnnnnnnnnnnnnnnnnnnnnnnnnnnnnnnnnnnnnnnnnnnnnnnnnnnnnnnnnnnnnnnnnnnnnnnnnnnnnnnnnnnnnnnnnnnnnnnnnnnnnnnnnnnnnnnnnnnnnnnnnnnnnnnnnnnnnnnnnnnnnnnnnnnnnnnnnnnnnnnnnnnnnnnnnnnnnnnnnnnnnnnnnnnnnnnnnnnnnnnnnnnnnnnnnnnnnnnnnnnnnnnnnnnnnnnnnnnnnnnnnnnnnnnnnnnnnnnnnnnnnnnnnnnnnnnnnnnnnnnnnnnnnnnnnnnnnnnnnnnnnnnnnnnnnnnnnnnnnnnnnnnnnnnnnnnnnnnnnnnnnnnnnnnnnnnnnnnnnnnnnnnnnnnnnnnnnnnnnnnnnnnnnnnnnnnnnnnnnnnnnnnnnnnnnnnnnnnnnnnnnnnnnnnnnnnnnnnnnnnnnnnnnnnnnnnnnnnnnnnnnnnnnnnnnnnnnnnnnnnnnnnnnnnnnnnnnnnnnnnnnnnnnnnnnnnnnnnnnnnnnnnnnnnnnnnnnnnnnnnnnnnnnnnnnnnnnnnnnnnnnnnnnnnnnnnnnnnnnnnnnnnnnnnnnnnnnnnnnnnnnnnnnnnnnnnnnnnnnnnnnnnnnnnnnnnnnnnnnnnnnnnnnnnnnnnnnnnnnnnnnnnnnnnnnnnnnnnnnnnnnnnnnnnnnnnnnnnnnnnnnnnnnnnnnnnnnnnnnnnnnnnnnnnnnnnnnnnnnnnnnnnnnnnnnnnnnnnnnnnnnnnnnnnnnnnnnnnnnnnnnnnnnnnnnnnnnnnnnnnnnnnnnnnnnnnnnnnnnnnnnnnnnnnnnnnnnnnnnnnnnnnnnnnnnnnnnnnnnnnnnnnnnnnnnnnnnnnnnnnnnnnnnnnnnnnnnnnnnnnnnnnnnnnnnnnnnnnnnnnnnnnnnnnnnnnnnnnnnnnnnnnnnnnnnnnnnnnnnnnnnnnnnnnnnnnnnnnnnnnnnnnnnnnnnnnnnnnnnnnnnnnnnnnnnnnnnnnnnnnnnnnnnnnnnnnnnnnnnnnnnnnnnnnnnnnnnnnnnnnnnnnnnnnnnnnnnnnnnnnnnnnnnnnnnnnnnnnnnnnnnnnnnnnnnnnnnnnnnnnnnnnnnnnnnnnnnnnnnnnnnnnnnnnnnnnnnnnnnnnnnnnnnnnnnnnnnnnnnnnnnnnnnnnnnnnnnnnnnnnnnnnnnnnnnnnnnnnnnnnnnnnnnnnnnnnnnnnnnnnnnnnnnnnnnnnnnnnnnnnnnnnnnnnnnnnnnnnnnnnnnnnnnnnnnnnnnnnnnnnnnnnnnnnnnnnnnnnnnnnnnnnnnnnnnnnnnnnnnnnnnnnnnnnnnnnnnnnnnnnnnnnnnnnnnnnnnnnnnnnnnnnnnnnnnnnnnnnnnnnnnnnnnnnnnnnnnnnnnnnnnnnnnnnnnnnnnnnnnnnnnnnnnnnnnnnnnnnnnnnnnnnnnnnnnnnnnnnnnnnnnnnnnnnnnnnnnnnnnnnnnnnnnnnnnnnnnnnnnnnnnnnnnnnnnnnnnnnnnnnnnnnnnnnnnnnnnnnnnnnnnnnnnnnnnnnnnnnnnnnnnnnnnnnnnnnnnnnnnnnnnnnnnnnnnnnnnnnnnnnnnnnnnnnnnnnnnnnnnnnnnnnnnnnnnnnnnnnnnnnnnnnnnnnnnnnnnnnnnnnnnnnnnnnnnnnnnnnnnnnnnnnnnnnnnnnnnnnnnnnnnnnnnnnnnnnnnnnnnnnnnnnnnnnnnnnnnnnnnnnnnnnnnnnnnnnnnnnnnnnnnnnnnnnnnctttgttaaacagatgcttgaaggcagcatgctcgttaagagtcatcaccaatccctaatctcaagtaatcagggacacaaacactgcggaaggccgcagggtcctctgcctaggaaaaccagagacctttgttcacttgtttatctgctgaccttccctccactattgtcccatgaccctgccaaatccccctctgtgagaaacacccaagaattatcaataaaaaaataaattaaaaaaaaaaaaataaaaaaaaaaaataaaaaaaaaaagcaaaaaaaaaaaaaaaaaaaaagaagcttggcctctgaaatgaggcatcagtctgcgagaaaggaggttgggcagtgtcctgtgtgtaaatggggatggttcccaccacttacttgagaccattgggaatcttggagttgccagtacattccttggatgtacttggctttggctggggcagccctgggccatgaccctctaacctggaatgccactgtttttgtgaactgctattttgagcagatattgcaagaagtgtagaaactaaagaggtgacttcttaagcatcagtctaggaggcaaatagggaaaatggccaagttgaggtacaagcaacacatctggaaagataaaggagggtgtaaatttctggaggatcagggaaggaaagacctcagagtatttaaaaaaatacagaatgctttccagatttgctcaatatccatgggcaagtgccaggctaatcctgaccttattcctccagtttcagcacacgtcattaggacagggtgagtagagactctttactctcccttcgtaagtggcattcgccagcttcaaacacaacacagaaaagactacagaaagctgtgtttttatcgggcctgttcactagtgtgtctgggtttacatccttcaagggcgagatggactattagatttggagtcctggatcagttgagggagagaaagcactgcaagtactttatcacaagtaagcagacctttactcaccacatactggaggtctcccatttttttttctacatgaactttaaaatgtattttaaaatatctattatttaaattagactcagctaatgcttgcagaagagaaagctggaaacagatggtcttggaagaccagtcagtggcccagcttccaggatgtaaatcccagcaaaggatttctaaggatgagctgggtcagtatatattccacaaaaggatggttccagttatagggtacctttcaggagtgccagtggggagctttgtaggacccgtgtaaggctgccatgaggagccggtgagctgtctgggttaggaaagttgaaagggcccatgcagtggtaaaggaggccgcagcatgagtgaaggtctttcctctgtgactggtcctgtccttgtcttctacatcccacaactgaaggagggactctgcctgggttacagctgcctccgtgcagcccggcaagaagcagggaatggagaaggcgctcagtgaatacttgaaggcagaaatgcagtattttactgttttctattattttcaatgaggggaaaaacggtaaaactctttttgaagtcatcagaccttccatttttggggatgaggaaagagtctcacagaacgggtggatggcagagccaagaattttaatgccagctgttttgaagagtgctacttttctggaaagttgtatggctagactatggggcttttgccttccaagaagtcgccctgagtgtagcattagttggagtaacactccctaagaatctgacgttcccctccggccaattctgatttggtcttgtgtgaaatcgcagtgcttgtgttgccacatgggggcgccatcgctcttcctttgccgtggtggttggttccgtgcgtagatcagacttcactccttgaggagtcccagaagtttggagaacacagacggccacctcctctccttctgggtagctaaaagcaaaataagtatggtttaacagagtcctcaagctagcaagcaggggctcaagcaagaaagtaggccttttgctactaatctcttaggtccttaccacccaaagtatgacatcactgttaaaaagaagaatcttggactgctcccagacctcaggtagatcccagcccagtgcttctcagtatacctggggatcttgctaaaatgcagattctgattcagcaggtcagagtggggctgaagagtccattttttttcttttctttctttctttttttttttttgatggagtctcactctgtcacccaggctggagtgcagtggcgcgagctcagctcactgcaacctctgctgcccaggttcaagcgattctcctgcctcaggctaccaagtagctgggattacaggtgcctgccaccacgcccggctaatttttgtagttttagtagggatggggtttcaccatcttggccaggctggtcttgaattcctgacctcgtgatacacctgccttggcctcccaaagggctgggattacaggtgtgagccaccatgcccggcgaagagtccatttctatcaagttcccaggagatgcctatcatggactgtgctttgactgagaaagacaacctataggagcctcagttccttcgcctgtaaaacgggggtaacaccaggcctgtccggcatgtgagatgatgcatgcggaaggcactgaagacaggaagaacaaaggtattgctcacaacaggtgtgcaacttgcccacaggtgtgcaacttgccctttaaagtgcagagtagctgacccagacataagtagtccgagttaccatagcctcctggcctttcttgtccttaccccaccaggagcccaggctccagaggaacaaggtagaaagtcaacctaagaaccaaagatgtaccgccctcccgtgtgacatggtcatagtccccggatggggagggagtgctgcttcctgcccctggggtgacacgtgaatccatcccacctggatggaggaacggaggtccctctttccttttgacttgagccagtccaatggactcagcctcgtgtgatcctattagtagcttcagcaaggagcaggaacaacacactgacccctgttcaaggtggagttctgtagctgtgggtagagactcctagaaagcagcgatttgcctctgaatcctggacatctgctgtagaaaagtgaggaagagcttcagaatgcctgggctccgtgtgaggctcctgaggcccagttttatttccttgcctaacttgtggtggagaggccaaatatgcatggcataaaagagacaagaaggccgggtgtggtggctcatgctataatcccagcactttgggaggctgaggcaggtggattgcctgaggtcaggggtttgagaccagcctggccaacatggtgaaactccgtctctactaaaaatacaaaaattaccctggtgtggtggcgggtgcctgtaatcccagctacttgggaggctgaggcatgagaattgcttgaacctgggaggcagaggttgcagtgagccatgattgcaccactgtactccaacctgggcgacaaagcgagactctgtctcaaaaaaaaaaaaaaagacaagatttcttggtgtatgagggttccccccttccttcaaagaggattgccccttggcattcatcactgtctacaagttcggtcttggtcatcttattttgcagatttctataatgcccaatctggaaaatgggcagaagagacaacacaggagaggtggaggagaaagggtgggaggaatctccttgtggaccagctcccaggctctcctttgaggtaaagcagtggctcgagtgtgcatctgaatcccctgggggcctggttacacagatgactgggcccgccctccaagtttcagattccataggtcttcagtggggtcctggagtttcatttctaacaagctcccagtgagcctgctgcttttgttctgtggatagagagtccgggtgacgggtaaaggagaaataactggggctgctgattcacatcacaaacagctgcgggtgatggaggttgtgggcgggaggtggaaagagcgaggctgagtacaatggtgaggagtaggaggagagggagaggcacaagcgtttctgaagaaatgccaaagaaagtttggtatctctctggaactgtttctgaacacaggacattgtgtcttgtgggctatgtgacttggccctagcttggttgtggccagtgctagtgtgtggagcagctcttctccgggcggctggcttatctccatgatgctcctggctccctggcctcgctgagtagttggcacgtctgtgacttctttatccacgtgtgtctttttcctggccaggtggaaagcttccccagggtggaggagatgtttgccaggttaaggtcccttctctaatggtacccacaagccaagctgcacccctgtctgcccctctccacccctgtcctcaaagtggagaatggctctgtggcttggaggggccttcacagcccaagggaaaggcctcagggtctccgatgtacccgagtgagacatgcatgtcagtcaatttccattaaatcagatccagcgcttcagcttgctccacacagcttttaaggacactaaaaataagccctaaattggagctcctcaagcagcactatctgttaatgaaattgcttcctgttaatttgagtttacaaaataagtatcacctgacaatctggcgtggctgtcacggcatccacccccaggaatgggcagctggtggaggacttcacctgggagctgaggactttctggcctcaagtgccatggcaaccaaaggggacccggcggttacaacaaatggggagactggacttcgtttgttggcttgtttgtccctttcgtaaccattctctgagcggtcagctcttcgtctagcggggcctacaggtaaatagataattaataatcaacgtgcaaggtagcaataagagaagtacaaggagctagggagcagcctgaggtggtagccaggagcggtgcgggggtaaaggatgagtgcatgtcggttgcataa

SEQ ID NO: 1419 - DNA, 1038 bp, Homo sapiens
ccactaccggaagtttctttgatgttaagaaaaacggcggaagtaggccgcagcgcttcctcagtatagtgcctcgagctggctcgcctactttctacggtaaagggaggtgctccacatctctatgcagctgtgcagcgccgcaggttccatgcgcaggctcggttggctaaatgcgctttccagccatctttcagccacccagtcctttcccaggttctcgagccaggacgtgacgtattcagacgtactgggggcggggcctcaaggggaaaagcgcctgagccgggatatcgcgagaacatcccgttctttcgtagctctggtgctgcggctccgctctcgtcgcaacgagatctttcgagatcttctccgcccccgctaccggcgcctcctctgcggccactgagccggagccggcctgagcagcgctctcggttgcagtacccactggaaggacttaggcgctcgcgtggacaccgcaagcccctcagtagcctcggcccaagaggcctgctttccactcgctagccccgccgggggtccgtgtcctgtctcggtggccggacccgggcccgagcccgagcagtagccggcgccatgtcggtggtgggcatagacctgggcttccagagctgctacgtcgctgtggcccgcgccggcggcatcgagactatcgctaatgagtatagcgaccgctgcacgccggcttgcatttcttttggtcctaagaatcgttcaattggagcagcagctaaaagccaggtaatttctaatgcaaagaacacagtccaaggatttaaaagattccatggccgagcattctctgatccatttgtggaggcagaaaaatctaaccttgcatatgatattgtgcagttgcctacaggattaacaggtataaaggtaaggttgtcagagcagaatggaccagtggatggacaaggagacaacccaggcccccaggctgctgagcagggtacagacacagctgtgccttcggattcagacaagaagcttcctgaaatggacattgat

SEQ ID NO: 1420 - protein, 146 aa, Homo sapiens
MSVVGIDLGFQSCYVAVARAGGIETIANEYSDRCTPACISFGPKNRSIGAAAKSQVISNAKNTVQGFKRFHGRAFSDPFVEAEKSNLAYDIVQLPTGLTGIKVRLSEQNGPVDGQGDNPGPQAAEQGTDTAVPSDSDKKLPEMDID

SEQ ID NO: 1421 - DNA, 33225 bp, Mus musculus
  misc_feature (1)...(33225): n = A,T,C or G
gagaggctgcccctcccttgggtgtttttttgtttccttggctccttatcaatcaaccagaggcaaaccccgggtgagcaactgcagtaaccagcagctgccagggcagtaggaacttcaattctggccctgacgtttataaatgtggcacagaataccaggagggactggaataaatcaaatcgcttcctcaagggtccccagggttgctttagactttcttcccaccaggggttggcgtcttctctgtctttgcaggagtgggagcgtggagcatggcactgtgcaacacaaaatgaaccacagttttcgcccttgcttcacagaagaccccactggtacatggagagaggctgggaagaggtcctgtgtgggaggatgctcgctctgccgagacataggctcttcgttttcatatccgaaaattaggtttttaatttttttgttttgtttttgagacagagtctccattgtgtagtcctggctggcctgaaactcaataagtagaccaaccaggctggacttcaagtcttttagaggtctaccagcctctatgtacatgcatgcatgcctgcttagctgggcatgttggcatacataatgctatcacctgggagtcttgagacaggagaatcaactgcaagtgaggccagtccaggcaacatgacaaaaccttatccaaaatgaaaaacaggcatgtgcttagggggctgggggctgggggctgcttctagtaaaggacttcagtggaacatttactgtttttctagagggcctgagttcagttccatgagttcatccatgttggtagcttacaaccacccagaatcacagctccaagggatctcttacctacttctgccctctgagggtagccacacacatagcaaacacacacagacatatacatgcacacacacaaataaaaataaataaggaaggcaggaagaaggaaggaagggcctgtctattgattttacagggctgttgctgaagatgcagctgggaagcctaacaggtgagcgctctgtaacctgcacaagcacatgggaaagccatgatgagggccagacctctgggatgtccagaagcagctttagaaaggtttgttttaaagaaagagagagagagagagagagagagagagagagagagagagagagagagagagagagagcaagagagagagagagagaagaaaagaaagaaagaaagaaagaaagaaagagaaagaaggaaagaaagagagagagaaagaaagaaagaaagaaagagaaaagaaaagaaaagaaaagaaaagaaaagaaaagaaaagaaaagaaatgttttattttgatttgggtgtgtgggtgtgtatggtgcaaggaacaggggtacttgatgccgagtgtatgtgtgtgtatgctcacatgaaggttggagaacaaatttgaagaactggttctctgttttcatcttataggttcaggggctccaacttgggccttcaggttgggcagcaagcacctttgcccactgagtcatctccctggccccagacgatgctttctgaggcagttccctgcagacctttcctagcccattccaggaacctccactttcttctttccttggagaattctgggcaagatgccctgagagtcagttccaaacacaactggaatcctcccaatgtcttttctaaacctttctttctcctgcccccagaaacagcaggcaaataaaggtggacaaatgtgcggagggagagactgccagggagtgggggcagggtatagggggaggagcgggggagggggggagtcgggagagggtttgccaaccactacgaggcaggaagctggtagcagctggttacaactcaccatgccactgagaacccagcaggctcctcttaaggttctgtagagatccctgctagtgagatgaggccggcatggggcccacaacctccttttctttatattgtcaaaatttccagacactgcacgcgacctttcacctgttctctagcttttctgcggatttggattctatctaagcctagggcgggctgtggctgagggtgaggatgtaggcaggatgctaatgatgcccagagcctatccttgggtcccatcaggaccgcagtgatctgtacagcatttccttctaagcctttcctacacataacaagattccacccagcttcactccccagaggcagctactggcgctagcttcttgttacaggaaccaagaaaaacctgattttctttaaacatttgctcaacactttatttagagaggttaggtactacacagggaggtgtgtgggggtgggggcaggacaatgaacgctagactgtgattctcaggtgttctgcaccatttgggatggtgggccattatacatcctattctttaaaacatacacaggaagcaagaccctgtcttagctaaagacaattaaccttgaggtcacagcctctacctgccccttatcagcatgggcttcttttaaacaagtacagtgatttccagaaggtaatctccttggcaaatttctcctgcacttacttccattcatgatggtgctttaggggtcccatgcatactggtcctccagccaaagcctgcctggcttacacagggccagctctcctggtggctggtaggatgagatttccacttttgctgtccagtgagggaggcagccatctttgctcataattgccatggtccatttttaaccattgctatctgggaaggaaggcgattggagcacatggttagaccaatataagtgaaggccatcctggagggtttatgcatcctaggctcagtggttggctcagaaccaagtctggaagcctggcagtggtgagccaggttatttaggccaaccgtgctagtaagcaatgctactggctattgggaaatactcgatattgaggacatttttaaagctgtagcaaagcattaacagagaaatcagatggtagaaactctgtttacttaaaaagcctgtgtgtcaagccaggccatagtggcccacgcctttgattccagcacatgggtggcagaggtcagtgactctctaagttcaaggctagcctggtctatagagtgagttccaggacagccagggctacacagagaagccctgtctcaaacaacaacaacaacaaccacaacaagaagcttgtgttaatcctagcaaatgtgaatttttttctgatgccttggtacagggagggggtctaaaaacccaagtacactacctacgtgccatggagagtaagatagaaggttctagaccacaagcctgtaatcccagatactctagagtctgaggcaggacggtcagaagttcaaggcctttagagtgagtgtgaggctaccctggacactctgtctcaaaataaaagctaaagggatcagaggacacagttcagtggtggcaatgtttgcctagcaagcatagggccctaggcacaaactccaataccaaaaagcaaagattcctccctaaatatgataaaggcctgaaaacatactgtatcagtagaggggtaaatggccattggtagtgaacttcctaccttgcagcaacggtgatgtcaggctgtgaagactgggaatggccaggaagagcagcaggtgccagagcagagggaggtattgacagaatctcaaccccagacacagcctctcctccacagagggtgatgggacattgcttagacatctgacttgcctttaatgtcctcggagcttcatggaaaggtctggagtgggatacattgggccacagttgtgtaaggacatctgccaatgaacactcagccatatttagagccccaccctcaccccaggcaacgatgcaaacatatgcacacatttgtgggactgggacagacagacctgggaggaaggagtaagaagattcagtgtacagggatggaaaggtagcttagtgattaggaccacttgcttctcttgcagggggcccagggtcagttcccagcacccttatggcagctcgtaaccatttgtaactccaattccagggggtccaacaccttcttctggccttcaagttcaccaggtacaaggaaatgcacttgacaagcatgtatacatgtaggcaaaacatccttacagatagataaaacacctctacagataaaacaaaccttaaaaagagactttgtgttctttggggacgttttctcgtaaataaaaaccctgccttgtttttagtgcatttccttgtcctagtgaactctgtgagcgtttgttcatgctagtcaaagattcttccactcggctatatccccagtccttgtttctggagacaatgtctttattttccaatacagggtatctttgtgtaaccctggatatcctagaactagttctgtagaccaggctggcttcgaattcacagagacctgcctgcctgagaacccaaagacaatctttctgcctcccattacagatatgcatcttcatggttaataaacgtattttacatgccccccacacacacacatttaaaatcagggtcttatctggaagtggtggcatatgcctttaatcccagcactggggaaacagaagcaaggcagatctctgagtttgaagccagcctggtgtacagagtgagttctagaacagcctgggctacacagagaaaacttgtctcaaaaaaccaaaccaaaccaaaacaacaaaaatggggtcttatgcagccaaggctagcttcaaacttgctgtgtaactgaggatggctttaaactcccgatccttctgccttagcttctcaagtgcttggattgcaggtgtgagccactgtgcaggcttgagagcatctttttacagttgtaccccaactctgtcagacaaaaagatgttttaacatttttatagcactgtcagtcccttctcaggactccttatttatctctcttccttgggaccggccttgtgattgcaccgttgtatgctggggtgcagcgttgactctgacagctgctatttaataaatgcaaaactcagagaaatgccaggaaacaaagaaccagggcctttgagtgtctcacctgtacacctgcaagagggagactgtcctgaggagttcagaggggcatctctcccttgctgaacacccagcaccagagtagccagagaggcctaggaatccaggacatctgttataaccagagaaccctgtcacccatcacaagcatgtatgcatgctgtctctgtgccaaatgcctccttcatacccatgtatactctgcagccatcacgacagagtaccaatgccttatgattgatgtggacaccaagataaaggtaatgagaacaccatggtgttatataggaacgcatacacacacacacacacacacacacacacacacacacacacacacacacgcacaaccgtacatactgtataagcatgtttgtatactcacagaacacctctaaaaagatacaaaagacaacagtgatagtgtcacatctgatagagaattgagctctggggatgggtggaaaagagattccacagcgttcttttttggacattttactgttgttccctgtgtatgtattacctacaaaatatgacaatagaaagaagactccctccttttaagaagtgtaggaggaaggcagacatgcaaacaattacagcacaatacgcgtattgttatagtggagtctctgcaggatgaagagactgtataggaaaagctgcatctgcttgggggtgtctgggggtgcctgggagttgggaaatcaggtgatcggtggagcctctctccactcagcgttactaaggtgccaagaactcagtgggaaagggtcagtagtggagctgtgggcgccagcagaggtcagaacggaagctatcttgcgtgccaagctaaggagttcagatttttatcctaataggaaagggcagctatgaagaaaattttaacgaggagtaacctgtccacatttgccatttaaaggatgtctttaaatggtgggtagatgacctgacctacggggatcaggaatgaagttggaaatcaacctgagacagaccagtgggtcagcgatgtgtatgcaaagcctggtctttgcgttcccacaaccagcatcctcttaagcattcaggaaccctggcagccagcagcccgcaccaggcagcaggcaggatctgccttcagggtagggctcatcccctgtttgcctacctccttgccctaggcttcagctccttggccaagtgaggcagggaagaaaacagagcagaaggctctccctctgcactcctaggtctctcttatttattccgctttctctctccactcgggtcctctcattatttctgagctgtacagcttgctgcttccccggctcgcttcttccacccctgtctgcaaagtgtcaatcaagccatcggatgagcagctcagccctcacatcttcggcgcctctgccccaggacatgagccacggctgctgacacatacaagcagcaaggtgtagggctgttggcttgccctttaatattcctccgatccggaatgggtgttaaaatggaatttgaggggatcgcttctctctgcctgcccctgtcaggacatccacaaggacaggcaatcctgatagaaggggaagcctttagaagcagatttgcttttcatttcaaggttgggccgtggccagtgtcggctttcggaggagccgccttttgaaattcttaacaagaagcagaatgcttgagttcaggaatccagggcaagcttgtgaagtagggacggggaaatgggattgtcattttatctctgaagggatattatattaaacggggggtggggggaatacagagaggcttggcagcttccccgcagcggccatggaggactgaacaatatcaggcagcaggaaggactgagattaaaacaaagaaagaacttcccaggtcctggatccagtagccagggagaagtgaagcatttgtttcccctggggatttctcctccttttataaattgtgaatggaggcaccgttttcatagaatacgggaactaatgagaagtaagctcaatgacctcaccaccaatttcttcctagatctttgatcagcatgcacagaagtcacggttgtaagcagtgtgtcatttgtgttctgtgtctctgtatcaatttcctatctgcgtttctacaaagcagggaactcatgcctgccatttggaatcaacatgtcagctatttgcttagctattccccgatgttggatcgtttccattattttttaatattataagagctcagatatgcatgtcttcatataaaagccttctcctcccccgagggaatagttcaccaagtagaatttctaggtcagaatatttgaactattttatcctactgtccatggccccagaacgctccacgggaccctgtatgaattgcaactcggacaacataataaggttgtatcatttttatttttgtttatttaatagacacataatagtaccttcgagttatttaattcccttctcttcgcctgctggtgagactgggcacacttccatgcaaggatttattgcctgcttttccttgcgtgcaagctgttcatctccgctgacatcttatcacaagaaatccaggggccgatcttatatatttctatcaagcccttacacactcagggtaccatatttttcttggttatatctgctattattttactgtaagggatctgtccagcgatgaggcagatgttatcctgtcctctgtggggttggggaggagggaggggacagaatgcagtgacctttagactctattttttttttcctccctcagaaggaaggaaaaaaaatccagtcaaatggcagtccttctttgcgttcctattttactaggaaaggaaagaccaggcagaagacaactagttgctaaggctagtctggggattgtctgtggacgtgttgctggggattcagtcagccactgtgccccccccccccatcattgttttctctcttccactgtatggccaccagatacacagcaaaatgttaaaatcagaatcacgactataagttctctcattgtcactatagcattgtagtgagagggaagtgtccccgggctgggcttgtgactcaggtaacagagtttcagcctaacattcattggtaaagccctgggtttggtcctcagcaccatattaaaccaacatgatggtacgggtctattttcccaggaggtaggggcagaaaaatcagaagttcaaggtcacctgtggaggcaaagcaggttggaggccagttaagcgatacatgagaccctgtatccaaaaaaaacgaaagaaaatactaacaagaagtaagttttggagcagatagacctgggttcacatcttagcctcttggcacacctagaatgggtccttgggcagatcctgccatctttgtctgtttagtggtgtgtttatgattataaacaaccaacctcaaaagttagtgtctaaaaacaagcattttattttacttcataaaactggggaatgctgacacagcttggctgttgggtcacgtgccatggactgggtcaggtcatgggtggttagtttgtctggacacaaggtccaaaatggcttctcttcctatgtgtgacttttctcatctctctctctcacagagtggctggacttctaacatgttggttcagggtctaagaacgagtgcttcaacacaagaagatgtccaaaggcttgggtcagaaagagggtagcagtcactgtattctattgggcaagcatgtaatgggaaaaccgacagagaacttgaggctatctctaatctgctcaaaaaaaatgaggataaaaatacacacacacacatacaaaaaaaaaaaaaaatcctgagaatttaatgagataatgtattccgaggcagatttaccaggaagctaataaaacttcaaccatggggctctctaattgagcggtctcttcgaagtcctgccatctagttttgcatgactaattttttcttttttttttttttttctcttttatttttagtgctgggtgctaaacccaggaccccgaacatgccaaacacaaaagtctaccgctgagctaagcctccaggcccctttccccttttatcttaaaatggacccccaaagtgtataagaatcaggacctgccaaccctggctctgtccccagtgcctgtaacaatccccattgagcctgctgcctggcacagaaggcttctctgcacatggcccctgtgtgtgctggctggtgcctggttccccgtgtgcctgaggacaaggttcttcctcgcactgtcctttcctggatttttttttttcctcttcaggatcatttattgtccttttttcaacatgaaagtaaaacacactgagaatgatttcataatcacaaaactgccctcccagttggcccctgcatctaccccctgacctcgccacccaccagggaggagggccataccctgggcatcctgccaagttcttggctggccgggtagctctctggaggaaatcaagctgcagagagggaagccagcagggggaggcagcattcccggggcccagcttggtctgggaggcattgaaattccgggcaaagtcctgagacaaagatcataatgagacaggaaggtggcatgggaaggcgccatttgcatgacaataattgagccaagaatagcaaactggagggatgcaagggtgaggctagcagctgagctgggcgaaacctcacaaatcagtccacccagctctgctctgcagggggaggcggaggctgagccctgtgccaggctttttggggagggaaagaaagacaaggacatgagccccaagggattgtgggaactctagtttagctggactttgcctccctcctccccctgtagcctggaggtgcctttgtttgccttctcttcagtgggctttgtggcatcatggctgctcagacagatttctgggatgctattgtgattggagcaggcatccagggctgctttaccgcgtaccacctggccaaacactccaagagcgtcctcctgctggagcaggtacactgtgccttctgcccttctgctatataagactgtcccctcttctttcctctcctagggagggctttccagaatttttgggctataagtgaagccaaacggtcagacatcaggaattctgtgcacttcgtagcttcgtagccacttcacgtggatcttgacaatgcaaagaaaattcccacccttaagtccacgtgaggtttcttggtatactcttttaagtctcttagttcttgccccggatcaagaagtgtcccacttcttttcattcttgcaaccctgtcttgtctttgcccacatggttgatacaaccagaaaaagaatcaattctgctctgggtaaccttaaataaagacagttttgcctagaggcaaaggctgatgtaccagctttggagaaagctgcgttttctcagctgctccttccagaacctagcaggagctgctgttgaattcttccacctttgggtaacagcgacctcctcacttgatgcccgggaactaagacacaggtcgtctttccttaaaggaaaagtgatcacatgactgcttcaaatgagggtggcactgggaccctgcagggcccctcaggggtggggcctatgcaatctgtcaagttgagttttctacccctgtggcttcttcctttccattctgccttgcagctctctgagcaggttaccacatcctgggaattgtcttcagttcctctgttttcccaaagcccaagggatttctgttacaacctgcaggaaaacctccattttgcttcaccccgcacccccctaatcctaagattgctcccttatcctgggtacctgaaggctcagtgagatgacatccttttcctgatccggaaaaccatggggctcgatttgcataatctggaaggttttctgactctgcttttctaggcatctaagcagggtgtgaattcagtgggataatagaaggttattaacaaatggatgggtggctgccagggctatttacaaaaggaaaaatttagtcagtgctgaggtactattgctaaccagaatgcctggccaatcagtgggcctcaaggagacctggaagtatggaaatatttgaaaatatctaggcctggcgatgagcacctgaaaatcccagttgctcaggagaccaatgtagggggattgcaagcttaaggcctgcctgggctacataacatgacagtgactcaaataagaaataaaaagaggtctagggcaatagatagctcatctgcagggcacctacttgcctcctttgtgcaaggccagaggtctaggccccaggattagaaaggaaccatttgaagcctaagatggctcctaaagaacaaagggaaggctgagccaaagggcagtgacttccattgtctttcttgtctttcttgtcaagttctttcttccccattcccgaggaagctcacatggacagagccgcataatcagaaaggcttatccagaggacttctacacgatgatgatgaaggaatgttatcagacatgggcccagctggagcgtgaagccggaacccagttacacaggtgggcgagggaggaagaccaggaacacaggggacccatccctccaggtgctttgaatgtgtgatgctgtaaggtgtgaacttgaaatgcaactggagggacacaagcccaggagggaggtgccagtcatgtggaggccttctgctcactgtcacagatgctgctggcctctgtacctttgagttccaggcctggttagatcctgtgaccaaggctcttacaggttgttttctgaaaacttagaggatgaccatggacaggtatctagagcaggcctgcgcaaagccttccagagccatcttatagggcctgcgtcaaaatctatataatttttttgttttttgttttttgttttttgagatggtttctctgtgtagccccggctgtcctggaactcactctgtagaccaggctggcctcgaactcagaaatctgcctgcctctgcctcccaagtgctgggattaaaggcgttagccaccaccgcccggctaaaatctatattctaactcatgtcctaacttaaaaaatagtatgtataatgtatgtgtatggatgttttgcctacatacttatatgtgcaactacatatgtgcctggtgcccagaaaggtcaaaagagagtattcaaccttggaactggagttacagacagttgtgagctgccatgtgggtgctaggaattgaaccttgattttctgcaagagcaacaaatactcttaaccactgagccgtctctcctgcctcctttttatgctgtaccctcatccccacaacaaccctacaaatgcattttattaatacactatcccctgggaacaaaagcaggtgttccaggggccagactacttgccaggaagtgaccctgaagcagcttcaaaccttagggttcctctgacagtggcctttctgacactctcagggaggaaccagaaactactcctgcacccccttttactcctctgaactcttaactgaacctcctttacataaccctggctctgccccacagggtggcagttattttaatggccgtgaaccaagaggttactgttctgttacaaaaacaccattaacttaagaacaaagtgaaatccattatgcaaatacagccagggcagctaattaaggatttattcagagacagctaatacacccagcacccaaataaaggagaatgtctttctgaggagtggcctggcaaaagggacccttctctggctgctggctgtgagtactactgagctctattaggtaggagatgagctgagccttgaagggcagaagtctgcccagcaaatgttgaccgacaggcaatcatgagatgcctggtgtcacacagtttggctttacttcctgactcaactcctaccagctatgtggttgaactctctgtatctcatagggatgtttgaaggttaaatgagtctggaaaatactcagcacagtgcctggtacctttgaatccttgaggtttctccctgctatcctgggtctgttgggctacagaggaggaagatcaagagacagcaaaagggaggcaacaaggacatcgggatgttacctagctgaataaggccctgggtttgatccccagcccccacccccatgacactgggcatggtggtgcactcctgcaatcccaacacttgggaatcaggaggcaggaggaatggtacagtgattaaaagagctgcacaaacttgagatccaggatttggatgccagcatccatgtatcaaaatccaaagaggtgagaaacgcatgtggtcgcaagcctctcaggatcccaagcctctccgtgtgtacagctcactcactttactccacagttttgttttaaaagaattattttttatgtatgtgagtacactgtcgctgtcttcagacacacaagaagagggcactggatcccatgacagatggatgcgagtcaccatgtggttgctgggatttgaactcaggatctctggaagaacagccagtactcttaaccgctgagccatctctccagcccttattnnnnnnnnnnnnnnnnnnnnnnnnnnnnnnnnnnnnnnnnnnnnnnnnnnnnnnnnnnnnnnnnnnnnnnnnnnnnnnnnnnnnnnnnnnnnnnnnnnnnnnnnnnnnnnnnnnnnnnnnnnnnnnnnnnnnnnnnnnnnnnnnnnnnnnnnnnnnnnnnnnnnnnnnnnnnnnnnnnnnnnnnnnnnnnnnnnnnnnnnnnnnnnnnnnnnnnnnnnnnnnnnnnnnnnnnnnnnnnnnnnnnnntcccatcccctcccctcccctcccctcccctcttcacctctttctctctcctccccttccctctctctcttctgtctcttccttctccttctcctcctccttcttcgtttttttttttttttttaacaaggtctcactcagtctcttagatattggggactgcaggcatgtgccaccagcagctgtgtagcagtcataatgtattactgtaaatcactgaattactacactctccgtttggaacagaggtcagcaaacttattctgtaagccacacaggaagtatgttaggcttctctggccatatggtctcttgcaaatattcaagtctgccattgtagtgtgaaagcagccaaagatgcaaatagatgaacctggatgcattccaataaaactttatttcaaaaaaaattattttgagacaccaaaatctggattttatgctatttccttgtgctttttaaaggtttatttttaaattttttaaaaatgtatttctttttattttatgtgttttgagtgttttgcctgcatagatatgtgtacaactcatacatgcctgctgcccttggcggtaccagaaggaatttgacccttggaaatgaatttagagagagttgtgagcctcgctgagaactgaacccagatcttctgcaagatcaataagcactctaacagctaagtcgtcgctcccagcttaggttaattttttacatgtatgagtattttatctgcatatgtgtatgtgtactgtgtatctggtgcccatggaggtcagaatgtggggtcatatccccaaggactggagtcatagactccatcccatcacgtgggtgctatgaaccaaatctggggtttcagcatgaacagccagtgctcttagccactgagccatctctccaccctccctccttttagagacaaggtttttttgtttgttttgtttttttggatttttggtttttcaagagagacagggtttcttgcctcgaactcagaaatccgcctacctctgcctcccaagtgctgggattaaaggggtgcaccaccaagattttatttcatagctgcctccctcccacacacgcactaagtaacccagactgacttcatacttgaggtctccctgcttgagcctctggagcaccttctgggcctgagctaccaccctgctcagtagctgtgtgtcttgcaatagtgttctcccagccgggcgtggtggcgaatgcctttaatcccagcactcaggaggcagaggcaggtggatttctgagtttgaggcctgcctggtctacaaagtgagttccaggacagccagggctacacagagaaaccctgtctctctcaaaaaataacaacaacaacaacaaaagtgttctcccttggatttctaaaaatcaaccattttaaaaaatagagaaaccatcttaacttgtggatgaaataggcaagaagctagatttggtccaaactggatatgttgccaatgtctacctccaaacagattcaggcctaagagagcccaggtctgaaaagtgttcccgtgccttacgctgcagccctgcatgagaagcgtgctcagatgtctcacagctccaattaagaaagatgaagagtaatgtgaatgtgccgtaaagcctccaaagcacgatagagtgctaagtattattattgccattgctattattctgtcattaacaactcctttcttacggctaccctaatttactcacgtgtactagatttttttattattattccttttacagagtaggatgcagtacagataggtattcccactctgaatggaatccgaataccgttctccacctttgggctgaatgccagccaaattgccttagctttgcttttaattttgattttctaaatgatttcatcatctctgtcgttcttgcttctctctggatccttctagacacaccggcataataccatacgataaatgatagaaatgagtgtatttaatgtcatctgatgatgatttgaaaaaccgcaaaaacctttctgagccagcggtgggtgggggttggggggaggttgcccagttcttctgttctgcttcctgtgacagcgcatatgaaacacgggtgggctcgggttatttgcatacattctgggaacagacaatgacatgtgtcggatcataaggcccgagtcttttgtgatgtgtgcagccgggatgctggtaccaacagaaaagccaggctctgagaccatctctttcctgccccgccttctccctttgagttctactatccagctcctgacccgggctgcccctgcttcactgacaatatcagacaagatcacagccgtaggcagtacagcagctggcagaacctggtggccccctccgcagctgctgcttcctgtgcctgcgaagtgtctggcttgtcagccacatcccctccctggagcaatctttgttaaccaattccacctcggcccactgagcggaagatgaaatacagagagctgttcccaaacctacaaagacagcagccattaccaggcccttccccaaggtgatgccgagggctggcatacctggcactttaaaccggagcaaagagaaaggcagccagggccccagggtgtgaaatggaagattccgggagagttggccacccctcccaggacctctctgctctcctctcccccttgaccccaggcctcttttagtaactgcttcgtgatcagaccctgtggtacatgggccacagaggcatcaacagtccagagggttcttcagcgacctctgctcacttctggagcaaagtgggctgtgaggaaggcggactccatacccagggctccctgttaaggtgatggacattctgggaggtaggagttgcaaacttgctagggttccctggtaaccctaggatttcagttcctcctctctagactagcctgactattcacgtcttagtcttttccccctctctatggaaagactttttgctccttttgccttttttcttaaactttgtagcttgggtctgagtttaaaaaaaaaaaagaggaggaggaagaggaggagggtccctaagcacaggcgtaagaaatggatgcagaatctatttattgggatccaggaaaaaccattaagaaaataagcacttaaatgattttcaatctgcctgtggaagtcatctgtcttcataccggggaaacggcccggtctccgatcctggttttgattgactgatttccaattctctgagcatttcccacaggagctgctcacctatctcccataatgacaggcctttgcatttccaggctgtgttttacattcatttccgatttgctcataatggtcaaaaaaagaaaaatctctctccgatccaaggcgtttctccaacggtgcacggttcccctcaggccaaatagctcagctgtgatccagggaaaatgagaatttcccaaacacatcttcggacttggggagggtccggcatcacggattcagatggaaaatttcccactgttagatcaatatctgggctaagaaataaatgtcacaggggcagagagctggagcaaaatgattacaatcggcacaattacattcggcagaacccattcagtgattactcctagggttggggagctccggcttcatccaccacgggacggcttgggaattagaacatcactcagcatttcataattcgacagatttgcccgttgtcttggcacgagttcattttccccacacaatacgtctctgtaaatggagttctgttcaaggaaagaaggaaggtaggaaggaaagcctgggtgggagaaggcaaactaagccagagtacaggagaggccaaggctgtgatattgcatgcagagcttaagagacactctgtggaatgtggaccagagtgctgacgacatctgtctgcttagaagagctgtaagccatatctttcccacaattctacttagcccggagcccatcaggtaaaaaggttcaagagcacctgagtaggtgcagggggtacaggcctgaaatccaacacctgggagatgatgggagaaagtccctttcttaagaaaaacaaaacaaaaacacacacatccaagatggggtgcaacttgcctagtgatgtatttatttgcctagtgtgttggaatccctggattccaccccacccccacccccagtatcataaaccaactacagaacactgggtgtgtcttttctttttcgagatgctgggatgggatccaggcttgggtctgaactgggcaaatgctctccactagcctttggggtgccttcctaattatcttgttgaccaagaagttgactaggcaagtttaaatgacttaagaactaatctgaagttcctttgggaggccacagaaaggagactgtttcctggctggggattctgcctcctctagcctaaacggagctttgaagaggcagagctggcctcactatctcaccatgaatgccgggtaggcgggggccatggcgaatggattgggcatgctgcgcggctctgtgtactgacaccggcccccaggcccactgcatccctaccccctcccagtcttccctttaatccccacgaccagataatgtgggatttggaagcatgtaatatccatgagactccattataggctattacgagctttatatgcagtacctgggggatgcagcagactgctgctgggctggggagctgcagaagccaagagagaacagaggaaccttcccaagggccagaggcaccttcccattgtttagctagctcctcccaaaaagggacttctggtctgttatagcagaggggcagggatcatcaaagaggaaactgttctctccctcacagagtaagaaggacgggagaagtctagggagactctctgagtttattgctggagttctgtgcaccaatttgtgttggtgcttgcgtgtgaaaatgccatagtgtgtgcgtgcccttctggagcactgcaggcttggcgtccctgtcccctgtccactcagtgtgagtggtaatgccaggccttgtaacaaccacaagacatcccataccaccactgacctgaagggagtcctgggtttcagaggaggaatttgggccctggagtagtgagtcaccggtcaaagtcacaccaaggtgacacccggattagaagcagaaccagatctccctttccctgaaatgagaagaagcaatgaggccggcaaatgcacaaggtcaaagcagtgtacgataggaagaggggtggggtggggtggggtggggtgagtggggaggagccagagctgacccggaggttaagaatgcattctgttcttccagactccctgggtcccagtcccagcaaccatgttgggtggttcacagctgcctgtactccagctcctagagatctgacacctctggcttctgtgtgcacttacactcatgtgcacacatgcacacacaattttaaaaacgtattataaaagtaaatctttggaaagtaaagtagatggggcggggtgggaaatgaggaaaaagaaatgctaagtgatggactagtactagtgatggatggataagggattgcatctcagtaggcacctgatagttcctttggcatttacaaggtgtaagaaaggtcatggagacttaggacctctgctttcaagaacaggatggagggctaagggacagtgagtgtcagggggaggatgtggaaatggtctggaaaccagccagagaatgccaggactccaggagtctaggtggctttacctgtgctctgaatgttagacagctgcaactgctgtagacatgggtccctcagtgaggaatgggactaggtggccagggcatgacaaatcccttcacccctctggcccttttttttttttttccgaaacaggcagactgagctcttacttctggggacgaaggaaaatccaggattaaagacaatccaggccaccctgtctaggcaagggatcgaccatgagtatctttcgtcagtggatttaaagcaacgctttccaaacattcggttcaccaggggagaagtggggctcttggacaagactggaggtgtcctctatgcagacaaggccctcagagccctccaggtgaggctgtacagtcctggggcaatgcaactcctttctctgggcatgctggcccctagtcaggcagcccctggcccatgtcagtataaaggtctttgttttctttgactttggtcctgatttttaagacagcccccccaccccaccccagcacacctgctgacctctttatcaacctggaagggaaagactagattcggcattcttttgttgttgttgtttttgtttgtttgtttgtttgtttgtttgttttgagagagacagggtttctctgtatagccctggctgtcctggaactcactttgtagaccaggctggcctcgaactcagaaatccacctgtctctgcctcccaagtgctgggattaaaggtgtgcaccaccacgcccggctagagtcggcatttggtctcccaggctgaaccatatacacaactaattcatctctcctcttgtccctacctttcagcatataatttgtcagctaggaggcactgtgtgtgatggagagaaggtagtggagataagacctggtctacccgtcacagtgaaaaccaccttgaagagctaccaagccaacagcttggtcatcactgctggtccctggaccaaccggcttctgcatcctctggggattgagttgcctctccaggtagggtgagctggagacctgagagtcagtaactagaggagaaatcttggagccagccagacttgactttgatctgcagcttcctagcggtcagcgttgggcaaattagttcacctcattaagcgtcagtttgaccaatatgggaaataacagctacctcaaaaggctattggtgaattaaactacctgatgttatacatcagatcctccaggagatagccagactgatagccctgcataaatatgaagtatatcagctcctgaaagggttataaaagggccacaggaccctaccaggccctgctgtcattatctatagagctccatggcttccccctttatctccaacttcctcctgccttaagacccttaggatcaatgtgtgttactggcgagagaaggtccctgggagctatggtgtatcacaagcttttccatgcatcctgggtctggatctggccccccaccacatctatggactgccagcatccgagtacccggggctgatgaaggtaaggagaaaagtggtgaaggtaaggagaaaagactaagaaagctactgaactactaagtgcccatggaggtcttggtatccatgctaacatccctctctaggaccctcctggagtctgtttcactattggccacctgcagcacaagctcttaaacacagggcagggctggagacgagggctaggtaactttagatgctaacaatagctagtacatgccaggattggagattgggatgatgggtgggcacgtcctgtatccaaacccacccctcaccggctggtatgcccagaaagccagctttacagctcatgctcattcagttgggggtgggggtagatctgctatcaccatggtgacaatgtggacccagaggagcgggactgccccaaaaccttctcagacatccaagacgttcaaattctatgccactttgtcagagatcatttaccaggcctgcgggctgagccagacatcatggaacgctgcatgtacacggtaagtgggctgttccaatctgcaaatcggggcatgggggtgaggggcagagatagacagacccccggccggccaggcctgactctatgtgacctctgatccagtgcgtgactttcaactagctagctaattcctgtggattggttcacctcggtgagagaggggcctgttaaagattattcatattcctttttattaggcagtgaggcttttgcctggcagtccttccctaaatttcccagaagaactctaaaacagttcttggcaagatgttcccagttgagcaggccttggggacaaagagaagagacagatgccaccaggcccgaggcatcttggctaaagttagttcacaaagatgactacctactgagtaggatagtggcagctattcagtgaggacagagtagattgggcaagcagagagcagacctcagccccgtccagttctctcttgaaagagacccaggccagttctttccagacagagcctgtagttcctacctgtcttcagaggacacaggtgtgactctccttctagaatactcctgatgagcactttattcttgattgccacccaaagtatgacaacattgtcatcggcgctggattctctggtgagtttgaggatgggcaggtggggtgcctgtgggtagacctactgcagtaccaaacaaaagggggatcctgcatgctttagctgaaggctggacactgggtgtatagggagggtaggcagttaaaagagggggtacttgtgacaggtggcaatttctggctttgggatgagaccatgaggagggaacttttccagagcccagagtctgtacttgaagatacatgacacaatctcctcctcccaggacatggattcaagttggcccctgttgtggggaagatcctctatgagctaagcatgaaattacccccatcctatgacttggctccgtttcgaatgagtcgcttctctacgctgagcaaagcccacctttgaccccagctgactctctcctgggcaggaaagccctcctaggggagatttccaggagatgtggccttgacgagtttcttctcctcctgattcaatggaatctcccataaacaccaaatgattgaacattttccccccaatcagcctccctagtctatctcatttctccttcccagaaagtcagcgagattcaccatcacagaacagcaaggggctttaagatggatgtctcaatggggaggggctggagacaggctcagtagactaagggactcctttaaatttctttttgctgggacactgggtgaacttgcgattgctttgactaaatctgctcagggggaatgtaaaacagattatattttataaaccactagtgcctttgggtttctttgccaaaaacttaagccagcctctatcaccaaaaaaaaagtctcacctctaataaatacacatttgccaggaaaaaaaaattgctgaaaaaaaataaacaaaaacctggattgcataatatctgcggtggtctttattttctacataaccccatttcttatcagctctaactatctaaattagtaccacggagtctgttaccaggaggaatccatggagtctccgacccatcgatgcactgtgtccccctggtctactgctttgtctcctcctcatcctctccctggatctgtaaagatgtttcgctccccactctctctcattaaggtgtattgtcaggtccttatgaagacagaactgttataccagggagaaagcgagagacacactcgcttagaaaccccgttcaatgtttgaatgttaaatgtgccattttattatcattaggattgctcccacttaatgaaacagcattagcaccgagtcggctggcctccttgcactaattgctttggaagagaatggggcttgtaactacccctggtgggtggaagggcgaggggtgtgaacagggactcaggcaaggctgatgtgcttagagcagtgcttcccagccttcctgatgccgtgaccccttaacacagttcctcatgttgtggtgacccccaaccataacattatatttattgctacttcaaaactgtagctttgctacttaggaatcataatgtaaatatctgacatttgacctccaaaggggtcacaacccacaggttgagaatcaccagcttagatggtacccaaaagccaggggtgggaaacctctagatagagccaacaacattccagagaacaggatcttacatgctctggggagagagaagctggggcaaggtggggtagacttgacaggaggaaggacagggaatatgaacagtaggaatgaaatgttcccaaagaaatacaccacaaaggaaattattctacctcccttggtcctttaaggcccagagatgtgtgttagctccgacttctccagtgagttccaaaagccagctgatcctgtcagccccatgccaagtctgctttgcaggcaactttagttggttctctcagaaattcggtctccataagatgataataatactgactgaccatacagaggtgtgtgaggaccaaatattattcacttactaatttgatacataaatagatttaatttctacaatgtgccaggtgctgtgtggatgcacctgtatgccagttacttttttttttttttttttttttttttttttttttttttgagacagggcttctctgtgtagccctggctgtcctggaactcactttgtagaccaggctggcctcgaactcagaaatccacctgcctctgcctcccgagtgctgggattaaaggagtgcaccaccatcacccggctgtgctggttacttttaactgtcaatttgaaacaacctggaatcatctgggaagagactcttaataaagaagtccctagattggcctgtgggcatggctgtgagggattgcctagattgctaactgacttgcgaaggcccagcccactggaggcctcatcccatggtagggcccctacagtctgtaagggtagggaaggctagtagaatattggacaggtaaaccaagatccatatgtttattctctctctgctctttgactatttgatactttaagtctctgccttgactcccctacaataatgggctctaatctggaattgtaggccaaataaacccctttcttccctaaattgcttttatccccccaggatatttgtcagggcaatagaaaagaaactaagacaatcagtaaacacacaaaggaaatcccgttctaaaacagcagcatgagcttgtcttggttagttagggtttctgctgctgggataaagcaccgtgaccataaacaacaacgtggggagcaaagggtttatttcagctcacaactatcaagtcacactctgttgctgagggaagtcagggcaggaactcaaacaaggggagaaccatagtctgagctgctgctgctgctgctgctgctgttgctgcggctgtggaggggtgctgctcactggcttactccttccggcttgcttagccagctttcttatagcccccagaaccaccagcccaggggtggcaccactcacaatggactgggtcctcctcatcaatcactaattaagaaaacactctacaggcttccctgaagcctgctcttaatagaggtggttgcccagttcttcccaaatgagtttagcttgtgtcaagttgacagaaagctagccagcacaagggcctcaaaaaaattagaaagagaaaatagtctatgatttggcagttctgcttctgggtatattttttccaaaagacttgaacctagggtctcaaaaaagttatctatatacccgtggttatagcatcattattcacaatggccaaaaggcagaaaaggcccagatgtccatttacacatgagtggataaacaaaatgtcatctgtgcatgtcatgggatagtagtcagtgttgaagagatccctgacatgcgccgtgtcgaggctgaaatgagctcaggccaggtgagataagcagagacagaagaaccaacactgtgtggttccgaccagcggtgagaaccacagagacagagaatgtggcttgccaggagccaagaggaggaggtggaaattgtactttgtttatgggttcagagccttagctttagaggataaaaaaaagttctggaagttggttacacagccccgtgaatgtgtttaatgctactaactatgcacctaaaatagctaagatgataaatgttatctgtattctaccatgatttttaaaagttcatgttcttatagaactgacaatggtagtgaggagacacgtaagcaatgcatgcatgtataaattgtaacacagaagaaggtgcatgcatgtaattttaacacatgagaaggtgcatgcatgtagattataagacatgagaaggtgcatgcatgcagattacaagacgtgagaaggtgcatgcatgcaaattataacacatgagaaagtggctagtgctttgggggacgtcagaccggggagggacaggaagtgctgggagtagctgtgtcttcccatgagtggtcagaggcctcctactgaggaggcggtcatcaaggaaacgccttgcactggtgtctattaaagaacgatatgaagtgcagaggcaatgtgactcgtttgctagagttgtctacctagtatgcatgaagccccaggttcagaactccagcaccccttaaaacaggcatggtacacacctgtaatcttagtacttaagagatggaaacaggaggaggtggaacagttcatccttatgtagccaagcataacagttcaaggatgagcttgaggccagcctggtcttggttgaaaaagaaaaggaatgagccacaaagcaagtggcgtgtggtgggggggtgtcagatagaccagatgctgagaagggcctgcatcctgcatgtgagttcagcaactctcatgctgacaaagctagcatgagccagggctaaggagccatcctcctgctccgggcccactgcctgccttctatttcctctgcgcctcccgatgcgccatcctcctcccccagccagctgcagctccccttccaaaatatccagctttattcagtctgtcagtgacagccaaaaggggagaccgatgtcttgcagaagcagagaaaagacaactgggggacgctaccaaaccctgcccgagcaggcttaggcctttacaagagtccccatgtaagctacaactgtgagtggccgagcagtaggagtgggcggagctggtgtgaagggataatggggtaaagcaggggtcagggagagagactgagaactcgcagaccaaagggccacggggcttccaggagcgtgcacccacaaagccagagcccaaggcccagtgtgtaccggtgggaggaagggagcttttctcagttgtggttggatgggatcacaagggaggtgtcacaggaagacgtctgagtgctcagggaggcagaagacaccgcgccgcgccgggagaggttggaggacaatgagagggcctctgtaagagcagaggatttgcccaaacagcatcatctcattgctctccgtttgcctgagcgcggccaggcatcccctcgcgggcagcccctacatatcttcaagatggaagaaaatcagaagcaattgtgaggcagtaggagtcctcaggaggggcaggtggggtctgcacaggctgcaagggagagataagggcaatgaagagaaagaggccggagtggttgccaaccagactgaggaaaacagaggcaggctaaaaatagactggggctatgcagggaggagagccaggccagaaaaggagggggagccgcggcaatcgatgccgctccccactctgacccaattcttcatctctcagcctcaccaaattgacaaatgaggtcttggtggggaaagactgacgcagagtgggcgcagagaggcctcagtgatctgactgcattgtgaggcaaaggggagagatgcagtgtggtcagtactgcttcaactcttgcaaagtttggtattcccgaacatgcttgagagtttaaggtgtgtgaatccaacctggaagacgctcaaatgcctggaaagctaaaacagggcaacctgaggagctggcctggagactctggctggaaaatgactccaggcaggcctgcgtttatttcccttctcagggagagcggttaaagagaatccggttagttctctattggacattctatgcagcaagagggatttagattcgacttcaggaaatcgatcccattagaaagaaatgtgagatattaagacatggacagagcaatgttagagctcgctctgggggtatcttgggcatgggtatccttgggcctcgagaagccacctaaagactggggcatgtggcaattcctctggaaaactcctggtctgagggcaatctaggatccctgtaaacctgcaggattggaaatgggttgttaagtgcaggaagggaaacacagggtgggttggatcagtcggctggggtgggggtgggaatgggggaggggcgaggggcagaattctatcacacaggacccggtggcatttgcataactttgaataatgaataagcccagctctggggttcctactcagcaccgctcatctgcatctttattaagctttataaatgattcagctccctaccccttccctcagccctgcccagcctgcccctaaaatgagcatcagggtagctgattgctcattattttaggctagatttgtttcaccaacatccagtgaggcatggagtgggggacgcaggagggaaagatggtagggaggtgcagggggaagttcaaggccagctccaagctgagacagggcacttacagaccagagcatacttctttaagttgatcctgtggccagcatcttaagacagagccatttcatagattctctgaaatgtgctgggttcaaatcctgatcaatcccctctcttgtcttccatcagctgccaaactcccagtaggccttcgctcagctccagcactgccctgccggcaggcacttgaacagccgaatgagtatagcccccggggaagttctcactttttcctgaggcaggaattttgctatttgctcaaaagaaggtggggagggggaatctgcaagaaccagcactgggcatagcagggagcatgagcacagtgtgtgaatttgcagaggagccacacctgttcctccagcacacctgaggcacccgaggagctgtgtaccctcccagccagtgtgttcatgctggcaacccttggagctgctggctctgctggctgaagcctgggagatagatgtattgaacagtctggatgggaggatcttgcaggaacctccgagtgctgagagggcagggcatttctcccagggcatgtgcaaacctggttgcacatgaaaaccacttggagaggtttttaaagatatgacgccggggcgacacccaagaccatttaaatcagaatcccccagagacaaggctgtgaacacaacctttttttaatttattttttataagtcctttaatccaatttgagtcttgttttgaaacaaaccaaccttttcattttttaatactagggattggacttagggtcctacacacgctagtcaaatgatatacagttgagccgtaccccactcttactatttttttttttttcgagacagggtttctctgtatagccctggctgtcctggaactcactttgtggaccaggctggcctcgaactcagaaatccgcctgcccctgcctcccgagtgctggggttaaaggcgtgtgccaccacgcccggctctactatttttatcatgtgtgcatgcatacaaatgtggataaatgtgggtgcaagcttgccatgtgcagaagtcagaaggccttggctatctgtcctcaccttcttcaccactgtgaagtactccaggctagctggccagagagcctcctgggattgttgctagagcactgtgctatgagtccagcttttacatgggatctggggatctgaactcaggtctttggcttacaaacaagagattcacccactgagccatttcctcagccccagccctcttttcttttgacttttgggcagagactaaattgcctaggctggccttgaacttatgattttccttccttggcttcctgagtactcagagttacaggcctgatatctgttttatataaaacatgtgtataaatatatgtgaagtaaaaactatgtaataacatcgggaaaatttaagcatgggccaaatatttgatagtaaaaaactatcaatttgttttcaagtgtgataaaagtattgtgattatgccttttttaagagccattttcttttctatgggggatcaatacaaaagcgtttcctgatgaaccttcagatctgccatcaactggcaggggaagtgggcaggtggggcacagctcactgttgatctttgttgaggctctaagggttaaaaaaaaaaaagtcattttattacactttttacttttattcacaaacagaaatggtggcagctcggtgacactcggtggaaccagaacttagggaagcagggacccagtgcccctttgagaacagaactggcttctagaaggggttttccatgatcctacataacaagggaagactcaatccatacaggacgtcctctaatgtctgcggactcaggctacatgggcacagaaacttggcatttagggatgaaactagggctgcagagtcaccatcaggctgcttcctcttcctcctcctctccccctcctcctacccctccctcttctccttttgtacctaccatcctctacagcagtggctctcagccttcctaatgctggaaccctttaatacagttcctcatgctttggtgacccccaaccataaaattatttttgtcactacctcacgactaattttcctactgttatgaattataaggtaaatatctgatatgcaggatatctaatgtgtgactcacagcctgggaaccgctgccctaggggctcagaagccccaggctctgtatcagaaagtcactgcttgaagctttgctcgctctctctaggaagcctgacccctattgactcagcaagtctccctgggctcatctgcctccaccaggcaggggacactagccctgctgatgtcatcaaggaggtgaggggaagctgagagcaactggagggaatttggggcaccaggcacccccaccagcagcctgggagaaggtctgtggttgttgctgtgagctgagagtcactctcctagctaggttctctttgcacagcactcctttaatgaaacaaaactcagcatctcgggtctctcccgccctgtacggatcgagtctcttcagccttgccaagccatccgttcaccgaccctctgcaccttctccaaggaccccggagacataattcttcaccctgattgggggagtctcgccctgtcatcgaactcagccctgccctccaccctgccaatcttgctccatttgggcctcaatcatcttctctgctccattacttttcctgatggccaccaggggctggggagcggggagggctggggagggtctgcttctaggagtgttggaatccgtgcctgcgcatcgcccgctgccatgagttatttcagcatcgatgtttgtctcgagctgattattccagctccagaacaggtggggcagcctgcggtggcttattcgtcagccaaggccatctgttcccaacaagctgagatttgtagctgatttctactggagagccaggggtgggggtggggaggcacatggagattgcactctgggccctgggggacccactgtccttcccagaacttctggtatgactgaagtcctgatggccttttctgtacccaaaccttcctatttcctaggaaaaactccctggcctcttgatttgacaacaacgctttttccttttcctcaagaggataaaacagacattagatacacaaatctattaaccagtatgaagttgggtcagtgagcagtgtctctttagagacaggaaaatttatatacacacacatatatatatatatatatatatatatatatatatatatatatatatatatgtgtgtgtgtgtgtgtgtgtgtgtgtgtgtgtgtatgcatatatacatatacgtgtgtgtatatatatatatatatatatggcatatataatcatatgaccttctcaattttatctccaacccctttatcaataggaatgtccttacccaaacccatcacctgcagggctccaggctgatggaagagacaggtttggaatctcttctcctccccacccttccaccctccaatctgtttctttcccagcttccacgctcaggcctgccagcagatgcctgctgctttaagggcgacattccctgagcaaggagccaagcagtgtttaagcagctttgccacatggcttacccaacccccacctaccctacacagctgacagctatacaggggagactaaggaaaaactattcttctcgtcagccacgtgggtcagtgtgggaccctctttggtgttagtgtccatgtgtgcattgactttcaaaatcacatacaaatttcatgctaacagtaacagatgcctcacccccccacacacacacacactagagagacagagacagagagacagagggagagaggcagagagagacagacacacagagaggtggagatgagaacagggaaagcgtgttttggcctagtacctgggactgcggatgctcaccacccttccagctccttcccataggcattgccaggaacagaacccaaggtcgtacacatacactcatgtctcctgactccctcatttattaactaacctgcattctcatgtgtacttattttcttttcatgatatagctttagctggcctagaactctctatatagaccaggctagccttgaactcacgaagacccatccgcccatgtcctgagggttgggattaaaggcatcctctacctcagcaggttgtcacatgtaatataaaaccatctccctgtctccctcccacttccctttccttcttccactctggggatagaacctaggtgttacataggctagacaagagtcttgagctacatcctcagccccaacctgcctcactgctctgttggcttatttcagcaggtccttgtgagcaggggcccatttctgatcccagatacctgcttggtggttaagtacatgtgtatccaaggtccacggtggcacttcacaggacctgtccttctggcacaaaacctgtcagagagtgccacccccacagttgctttccatgatctagtagtccctggggctagactctgccccaggatgacaacctgcaaatggtgccaggccccagtgttagttaaaatgagacactggaccttcttcatcacatatgattttata

SEQ ID NO: 1422 - DNA, 1686 bp, Mus musculus
catcatggctgctcagacagatttctgggatgctattgtgattggagcaggcatccagggctgctttaccgcgtaccacctggccaaacactccaagagcgtcctcctgctggagcagttctttcttccccattcccgaggaagctcacatggacagagccgcataatcagaaaggcttatccagaggacttctacacgatgatgatgaaggaatgttatcagacatgggcccagctggagcgtgaagccggaacccagttacacaggcagactgagctcttacttctggggacgaaggaaaatccaggattaaagacaatccaggccaccctgtctaggcaagggatcgaccatgagtatctttcgtcagtggatttaaagcaacgctttccaaacattcggttcaccaggggagaagtggggctcttggacaagactggaggtgtcctctatgcagacaaggccctcagagccctccagcatataatttgtcagctaggaggcactgtgtgtgatggagagaaggtagtggagataagacctggtctacccgtcacagtgaaaaccaccttgaagagctaccaagccaacagcttggtcatcactgctggtccctggaccaaccggcttctgcatcctctggggattgagttgcctctccagacccttaggatcaatgtgtgttactggcgagagaaggtccctgggagctatggtgtatcacaagcttttccatgcatcctgggtctggatctggccccccaccacatctatggactgccagcatccgagtacccggggctgatgaagatctgctatcaccatggtgacaatgtggacccagaggagcgggactgccccaaaaccttctcagacatccaagacgttcaaattctatgccactttgtcagagatcatttaccaggcctgcgggctgagccagacatcatggaacgctgcatgtacacgaatactcctgatgagcactttattcttgattgccacccaaagtatgacaacattgtcatcggcgctggattctctggacatggattcaagttggcccctgttgtggggaagatcctctatgagctaagcatgaaattacccccatcctatgacttggctccgtttcgaatgagtcgcttctctacgctgagcaaagcccacctttgaccccagctgactctctcctgggcaggaaagccctcctaggggagatttccaggagatgtggccttgacgagtttcttctcctcctgattcaatggaatctcccataaacaccaaatgattgaacattttccccccaatcagcctccctagtctatctcatttctccttcccagaaagtcagcgagattcaccatcacagaacagcaaggggctttaagatggatgtctcaatggggaggggctggagacaggctcagtagactaagggactcctttaaatttctttttgctgggacactgggtgaacttgcgattgctttgactaaatctgctcagggggaatgtaaaacagattatattttataaaccactagtgcctttgggtttctttgccaaaaacttaagccagcctctatcaccaaaaaaaaagtctcacctctaataaatacacatttgccaggaaaaaaaaattgctgaaaaaaaataaacaaaaacctggattgcataat

SEQ ID NO: 1423 - protein, 390 aa, Mus musculus
MAAQTDFWDAIVIGAGIQGCFTAYHLAKHSKSVLLLEQFFLPHSRGSSHGQSRIIRKAYPEDFYTMMMKECYQTWAQLEREAGTQLHRQTELLLLGTKENPGLKTIQATLSRQGIDHEYLSSVDLKQRFPNIRFTRGEVGLLDKTGGVLYADKALRALQHIICQLGGTVCDGEKVVEIRPGLPVTVKTTLKSYQANSLVITAGPWTNRLLHPLGIELPLQTLRINVCYWREKVPGSYGVSQAFPCILGLDLAPHHIYGLPASEYPGLMKICYHHGDNVDPEERDCPKTFSDIQDVQILCHFVRDHLPGLRAEPDIMERCMYTNTPDEHFILDCHPKYDNIVIGAGFSGHGFKLAPVVGKILYELSMKLPPSYDLAPFRMSRFSTLSKAHL

SEQ ID NO: 1424 - DNA, 124748 bp, Homo sapiens
  misc_feature (1)...(124748): n = A,T,C or G
ttgagactaggagttcaaggttactgtgagttatgactgtgccactgccctccagcctgggagacatagcaagactctgcctctaaaaataaataaataggccaggtgcggtggctcacacctgtaatcccagcactttgcgaggccgaggcgggcagatcacgaggtcaggagtttgagaccagcctgaccaacatggtgaaaccccgtctcaacaaaaaatacaaaaattagctgggtgtggtggcaggcgcctgtaatcccagctacttgggaggctgaggcaggagaaccacttgaacctgggaggtgaaggttgcagtgagctgagatcacaccactgtactccagcctcggcgacagagggagactctgtcccaaaaaaataataagtaaaataaaataaataaataaataaataaaagatgggggaagtgtaaagacaacccacaaaatggaagaatacttgtaaatcatatatgcgacaaggaacttatatttacaacatataaagaactctcataactcaattaaaaaaccaaacaactcaattaaaaatagacaaaaatcttaatagagatctctaagtaaatacacaaatgaccaataaccacatgaaaaaaagtttaacatcactagccttcagggaaatctgattcaaaaccataatgtgatactacttcacgctcactaggatggctttaatcaagaaggcagaaaataacaagtgttgtcaaggaagtggagaaattagaaccctcctacactactggtaggaaagtaaaataatgcagcttctttggaaaacaggcagttcctccaaaggttaagagttaccatacgacccagcaattctgcctctaggtgtatatccaagagaaatgaaaacttgcacataaaaacttgcaccctggctggcacggtggctcacacctgtaatcccagcattttaggaggctgaggtgggtggatcacttgaggtcaggagtatgagaccagtctgaccaacatggtgaaaccccgtttctactaaaattacaaaaattagtcgggcgtggtggcggacatctgtaatcccagctacccgggaggctgaggcaggagaatcgcttgaacctgggaggtggacgctgcagtgagctgagatcactccactgcatttcagcctaggcaacgaagctagactctgtctcaaaaaataaacaaacaaacaaacaaacaaaaccaaaaccaacaacaaagaaaactggcacccaaatgttcacaacattatttacaacaccaaaaagtagaaactacccaagtgtctatcaactaatgaactaataaataaaatgtcatccatacaatggaatattgtttagccattaaaaagcaatgtaagtattgataaatgctacaaccaggatgaaccttggaaagattcactgagctcctctgagtaattttaggtatcacttgtactttcactcaggttagcaaaaaccagtgttttattcaacacattcatagtgactagttgaattccatttaaattaagattagacaatttattgaacattactgatttagctttcaaaaatactcctggaggcatacttgaacttaccaagaacataccaagaacttacaacagaccaacatgaatcccatctccagattcaaatgaaagcagtacctaaatattcctttgaacctttatatctattaaaaatacacaagtcatttacaaaagccaaaactgtcctaatatattattagtggagctatatgtaaagtacttagtgagccttaaggaacagcagcagattgatgagattacaactgcatcctaccttttactgagtatggcaattaattttgggacaggccttaagtgaaaaatttcccataacagtactactaagtacttgccttactttacacaaaaactgtaatctttcaagagtataacctccttttccactttaaatatttctgacacttgcactcatttcataacaattagcccctaagccctacattaagaagcatgcatctgaacctgagttaaaattgaacattaccgtatcttccatatttaggtggaccagtaagacaacatgacacgtaaggcaggagaatcacttgaacctggaaggcggagattgcagtgaactgagatcacaccaatgcactctagcctgggcaacagagtgagactctgtctcaaaaaagaaaaaaaacaaagacaatacgacatacctagattctaattcaacacagaaaatgcaaaacaaataaataaataaataaaataaacataaaaccaaattaggtttgtttactgtagaatcattttactattgatggggccgggcgaggggaaggaatctagacgttgtcacctccagttcgtcagtgctaggcttctaagcacttacaatgtcaaaaacaacatgctgacaagataatgttaaagttaatatattttaatctatcacttgcctgatactattctaatgaggagctaaacacaacaaaatcagaaaaaccacctccttaaaagttcaaacaggttgggcatgacagctcactcctataatctcaacactttgtgaggccaaggtgagaggactgcttgacgtgcctgggcagcatagtgagaccctatttctacaaaaacatttaaaaaattagcccagcatggtggaatgttcctgtggtcccactacttgggaggcttaggtgggaggatcacttgagcccagagtttgaggctgcagggagctaggatcaagccttggagaccctgtatccaaaaacaaacaaacaaccccacttcaaacatcaaacattttctgcaaggcagttttctattctatgtgtgaaacctttgttacgactcactgaaaatatgcaaaactccaagctgagcttagttttgcctgtgcacagagacctttttactctcattcttcgaaaacctcattttggatctcgctgccaacaccagagagaggaaagctggccaacaattccaaatataacacgcggaggcaaatgctacagaaatctgtctgacgggaagggaccatgctgaggtctgccgaggtagatgcacttctctatcagaccattttggtccctcagtctgtttggagcaaaatgccataagaaggtaatcacaggaaaccagtcagttttatcatcctgattactgatgccccatggtattcactctgtcaatgacaacaatcctaccaatctcaaacagaaagatgggtcagtgaaaagtaaagctgtactggttattctaatttttaacagattttttgggatcagtccagagacctttcagaaagctcaactcatggcatgataattatgatgaagtcagattcaccaagggacacttaaaaacatatctccctccatggccgggtgtggtggctcacacctgtaatcccagctctttgggaggccgaggcgggtggatcatgaggtcaggagttcgagaccagcctgaccaacacggtgaaaccctgtctctactaaaaatacaagaaaattagccaggcctggtggcgtgcgcctgtaatcccagctactcagaaggctgagaaaggagaattgcttgagcccgggaggcgttgcagtgagctgagattgcgctactgcactccagcctcggtgacagagcaagactccgtctcagaaaaacaaaaacaaaaacaccacacacacatctctttccaattctctagggacaggtttagtaacccctactatcactctgaataattgataaaccagttaaacttggataaaatgattacactatcacttaatcaaaaagacatcagttcttcaaccttaattctttggtgaggtcacggtactgagcacaagacaattcattccagagaatcattacagaaaacccagaaataggttcccagtctaactgggaagagatgacgtgcctcatacaaagcattgtctcctgagaaaagacaacaattaaaacagcttatttgactagtcatttccttactatttatcttagaaagatctcctgtggtttatagctgtgttaccaagcccgggaggtaaagtttgcctagaaccacttttggaacacttgtactggattccgttcacagtgaggcagactggcaaggaatactagagactgaaaaaagacttatcccacagagctttggatagagaaccacagcagcactgcaattaagacctacagcatttgcaaaatttaaatttcactttttctttaaattttgtagagatggagtcttgctatgttgcctagactggtcttgaactcctggcctcaggcgatcctcccaccttggcccctttaagtgctgggattacaggcatgagccaccatactcggcttcaaccttactcttgtactttccgtatggaaggaaaattatcattatcatgcctacctaaataattcagtcttagccagtttaaaagggaagccagaggaaatataaccttactctcacatgataaaattaagcagtaataggacaattttttttttttctcctgagatggggtcttactctgtcacctaggctggggtgcagtagtgtgatctcggctcactacaacctctgctgcctgggttcaagtgattctcctgcctcagcctcctgagtagctggaactacaggctcgtgccaccacacccggctaattttgtatttttagtagagacggagtttcactatgttggccaggctggtctcgaactcctgacctcgtgatccaccctcctcggcctcccaaagtgctgggattacaggcgtgagccacagcacccggctgggacaaattcatgaaaacacattcaagaataaaaatgttctgagacattaaatacttgatctaactactctgattgagttaataaaatacttcactctccagcctggccaacgtggtgaaaccctgtctctactaaaaatacaaaaattagctgggtgtggtggcgggcacctataatcccagctacttgggaggctgaggcagaagaatccgttgaacctgggaggtggaggttgcaataagccgagattgcaccactgcactccagcctgggtgacaaagcgaagacgcctgtctcagaaaaaaacaaacaaacaaaaaacaacaacaaaaaaaacttcactcttggtggaaagagtgtggcttcagacgcagaaaagtgagataagcctcactaaatgaaattcgtctagggaatacctacttaaaagacttcctgcctttgcaccaatatctacaatgctttgtgatttagataataactcagataagtcaatggtacattcagtattgacatcttcaaagggagaattggagatgtgaaacaagcactacttcatttacacattcacaaatctctgattaccagttcccattcaatgcctcaaaaaaaaaaaaaatttcaatgaaatgcacagtctgggcaagtctgaatctcaccaacagctaaagagtccctccttctttctcctttcatctaaagtggaaactgttaattgttacaacttgacaagactttagactcgtctaattaaaaaattcagaggttaggttttagagtttaaaagcccaatctcaggcaaaacagacagcacacttttcccatgcctgaggtttctaataaacaatttcagctttatcaaataagagagcttatcaaattctcactcaacatgcatgtcagcaatcatggttaacaccaatttcatcctaggagtaggacgtaagcccacattttaaatcaagaagtctacaactcagtcctggtatacataccaaacaaacacactaaaaaaatgtaagcaactgggaataactggtaagcaacacaacgtatattcaggcacaaatttctcctaagaatagcaaaagaaatgtgaccagaaatatcttctccaggtggattacaccttataggaagtaaaggctaaaaaccacagacccttagtcacttcataataaaaattttaaagccagcagcaaaacttcctctacgataatcatttttgtcccagcaattttacaagctgggatggggtgccctcctgggcaaaagtatcttgggaatggtaatgggagtttcctacataacttctgaccataaacttaatttgctcagtatcagtcatctgtctaataagtgttcccaaacctgcaattagtacaaatatacagtagacactactccacaaaccgagagatggaacgtgaatggaactgttgagagaccttcggtgaaatttcacttaaaacaaaataaaaagagggctaaaaaaggcaacatcaaacaactggtgggaacacagaacagcccccttttcctctctccagtctggctcctctctcaaacccctgcctcagtcaactgttgcagaacaacagaacgagacccagtagaacaagacgaaatctgggtttgctgccgcagatgtgggatttttgtggagggcagaggtgatttcggccggcagaagatggagtttaaactcttctttgccggattgtcctgggctgagccgctgaggaggatcacgcagcgggcgatcaactcaggtccctccctctcggttcggtctctcccctcctctcatgtccagtaagggggaaaaagcgtacggctttccagctctcagctccttaaaaatgcctttctagtgccaccgcacacaatcctccctctggcagcaaagaattttgcagcgaagggctcgccgatccggagcggagaaatgaaatcggcgcccaagggcaattttaattgtctaacccggcccgatttcctaagaggcagcggcgccgggagggaggagggaagagggaggaggaaggaaggcagctctgagaggcaacagggggcaagcggaggcagagaaaggggatcaaagcggcgagatcccagacggggcccccgaggagcttctgcagaaaggactctggggctgtccccaccgttcccccgagagacgtttgcaaatcatatatgcagccaaaatggcgctgagaataaaaatataatttaaaggcaggtcgccatattgtaaacagagaggcaaagaagaggcggactcgagagacaccctccacgattttttctacagccacaagcgcccggttgccggggtctggaccagggcaactcaggtggccgagggctccacgcacccaccccgaggagatcccggccgggcaggagccccgagggcagcgggcgcgcgggcaggcaagcggcactgggcccggagctcctccccttcctcccccgccactgccggctgtccccggccggctctgtcccggctccccagcgacttccaatcccatatggggttctcttcactcgtcccaacccccacctcggggtccggacccaccgctgctcctccccgctaaactgccagaacccggcggacacctgggggcggggaggtgctcgccccggcagctgcagaaagtcagctagcggctgcaagcgcccgttatttcggcagtcaggggcaggccgggtgaaggaatgcgcagagaagggtccgccaagaagctccaaaagggtccccagaccttaccagcactggaggtggaaggcagccgggcagtggtcgcagcacaggagatctccaccttccttgcagctatcgcagctgtcgtggttggtggccctgccgcttctccggggctccttctcaggcttccgactgcgcttttctgcctcgtccgtcttggggggagccagcagagcttggatttgctgcacacacatacaaacggcgtgtgtgcacactcggagctcccgggcggtccgtcgcccccccggcgcggtttctccgtcacccacccctctccccccttttgtccttcttcctcccatccaggctgctcccagaatctctcagcccccggaaccagggggagcccaccctaaccgcgttcctgcagcacaacaacgagaacagcttcttccaaatggggaggatcaagggtagggggatgggaagagggtgcgcggttcccttcttgccacttccttgtatggacagtgggggactccaaagacccgctcgggagaggcccaaagcccggtacccggacgtgctgggggaagcacaaaggggccaacaagaagggggtggggaggcctgccggtgcaacgagatggagtgggctggcgcctcgggagagcgaatcgagggcggcgggtaggtgaaactgctgcaaacgtcctcggaggctgagctcagccccctaaattgcaaagaggggagggagaggctaggtgaggaagaatccccctccctcggccatctaggcgcttcgagtttaggactggctttgtggggcggagggcggaggttccctcccggcgctggaggaaggagatgaggagggccactcttacctccatcagcccccctgatgtgtccaagtcgtacacgatcgtcttggtctccattttctcccacattcatccacctcccgggctgggtgctctctgctccggcccccccaaccccggggggaggggggaggtgaggggagggggcgctcctgaccccggccccgcttttttcccaatacgggtcccgacttcctcgccctggctcccccccaccccccggcccccagtccccgggacgacagcgtcctcccgacgggccgcgaggggggagcggcccctcagtcccggcccggctgctggctgcacagtgggtcccggctccgggggtcaggcctcggcggggcctagtcccacaggctaaagccggcactggcgacagccggtccggccgggaaggctggcgggcgctgccatcccggggctgggggtatcggagggggggtgagaggttacgtgaggttgtggtacgtgaggtgactggggggagggtgatggggggtggtccccgggctccgcctctcgccgccgccgccgtctgcgtcccggctgccgcgcacttggcgcaaacttaccgcgagcgcccgcaaagccacccgcgcaggcgccccgggatcggcgctcgccgcgcgcaaccgcagtgacagccggcggcctggctcccgcgcagccgcggtgagggagtaccccccagcgcgcagccgcgctggcattcgtctggaggaccgaagccccacctttctgccctgcgccagcgcactgagacaaaagggcgggacctgaggtctcgcgcaggcgcttgagaaagcttgtaggggtcaaggcgcagccgcaggaagctagggactgttcatccattggtgtttgtgtgcaaactaagacgactctgttctgcgcaggcgtgttgggggtgctcccccttcctctccataacacagacgcctcccgcgcaggcgtattgccttccgcaggccctcacaagaaagctgctcctttcgccattttggtaatgggatatgggctatcatgcccttggagtcctcaggcatgaacagaaaggagcaaggtgtggtgttggatggagctggtcgcctgtcggtgacagcagtattcctagggatgttgtacttgaccgtttggttctaccatcgggtgtggctggaccaggccaccatattggtaaagagaaaagccatttgagacagaaaatgacgcttttggaggcgtgtgggatgactgtggttcctaattctctcccgctcctgacagataattttatcagttaattgtatcctcagcatccctgccttgcgtggtggtggcactggagagttccgcctgcccgttaccaccctctcttcaccactgtccctgagatctgctcttcaagaggaagcctaaagtggagagtttgtaatcctgacaacgcccagctacctgcgtaccccggactccaactcccagtttgcaacgccaaagggtctaaagggcgaacgggggcgcattgcatcctgggagcaagaatcgcgataggtctgatggattgtgggaactgtagttccatgtgcgtgcgatgcactctatggtaggatagacccggggaagagtcatttgccggccaggaagggatacttttgagagcgtcagtgctgcatgccgggatttgtagtctgagggcccgcctcgcattctgggcggggattcatgctccttttcagggcgcccgctcctccccttggtattgccgtcagagatgggcggttggttattgctgcctgatggtggatgaagcagtggaaaagagaattgtatcgttgtgcttgacactaggggtttagttggaattgttgcttcgtagctgtgctcggcccacttttaatgttaagggacacagcattctcagagtcgtcaaactagcaagggtttagagaccatctgatttaatcccctcttttccagatgcacagggaggcgcagtgatttgcctaggtcacatagtgcatttatggcagacctaagaattggatttcttgattctcaagccagacactgtccattacactatgtcgactgtgtctaaggaattactatgcttgctttggggacagtaaggaggatgagttagacagagtggggatgtcagtgtatggagtcttaggtttctgttttcctgacttttcgcttttctgatgaccctcttggtgcctggaaagaatgataaggtcatggatggtggggtggagaatgtcatgtgaattggctgccctctgctttctaccattctgagccaacaataaacttcaggagctgtggaccagagatgtggccatcagagaggggagggctgagctagattgtttgtatgaaagaggcaagattttctatctcctatggctatattttatgtcacaggctctcagagtttagaacctcatgtgccctctctctttggctttttttcctactgctcagggcccagctgtgctgctgtgttaacctggaggcattatggaacaggtaagtaagccattggcatccatccactggacaaggctttgctttgatcaacaccatcaattgcagctgataataggaactatgggctaatgagggaaataagacttggctctgttgacaagagccagggaaacttcacacctcttcctcttggaacttgcaggatgaggttaggccagtggggccaaggaatgctcccaccttggagagctcccgccctgacagttgaggggggattgaggggcgagcaggtgggatacagacgcctttggaagtgacctcttgtggctaatctaggcactgcactctgcatggacaagagcttctccatccttcaaggtggcttgtgctagagccaggggtaggcagcatgagtggtcaagacttcccttttggaagactgtagaagcagaaggtgctggttgctgctattatttctttcatggatttttctctactggtttctgagctcccataatttcctgttgcctgcctcttgctgtcactcttggagagcagcaatgcagggcacacctctcagcatggaatgtgcatactgggggccaacgctgggcactttccatctttgtaggtgctggggcccatagggaaggggcaaacttgagcacatcctcccagccacctttttccagagcccatggttagggcctttgcctaacttaggatccaagcccgtaagctgcattaccactgctcctgacaatctaagggttttgtaaggccaagccagattagggcttcatgttttggggatcagtctctgtttcctattctaatttcccaagccttgcttacttagaaataaggggaaggagagatgcatcagacttcctgagcctagttagcattgagaagggcatcagtggcgttgagaagggatttgggagtgtgccagcctgtagttctggacctggcaaagaggaggaaataaggcattgggtggatgtgcagtggggttcctgggctcccacatccctgtaacatcagccattggggcctctgattttgcctgctatctgttgcactgtcccttttggtacaggggaccctgttcaactgcatgcaataatttcttttaaaataaaatctgagcactttgggtggctgaggtgggaggatcacttgagcccaggagttggagaccagcctgggcaacatagtaagaccccatctctacaataatttttttttaaattagccatgtgtggtggcctgcatctatagtcttaactattcaggaggctgaggtggatcacttgagccttggaggttgaggctgcagtgaaccgtgatccagtcactgcattccaccctggttgacagagtgagaccctatctcaaaaacagtagtaataaaataaaatctgaagatgattgattggtgggtctagcatgccttctggtcctgaagtccatatcccatttatctgccacctcccgtccctccaagaaagcatcattcacctggccattgctttttttttttttttttttttttttccaaaaacaccattttaataaggaaacaacagaaataaaagattgttctctggctggagcccagaccccatataatacattacatgtacaaagtggctttcagccagctcctgggcgtctccctggggctctcctaccacctgttccatgccaaattcctgggtccttggacctctgctcctctccagaatatgcccaccccctccccttatcccataacacagtggtcaagaggagagcctgacaagtggctggaattggaggagggactattagggtgaagatgtttgcaacagctaaataaacatcggaggaaagtctccctttcctcagggtatagggtggtcagtggaaaatggcgtgtcctgctttggtgtggagcatgagtgcccagggaagcccaacctgaggtgggggtagggtccccctgaaccccttaggatctcctagaattactgcctccactgggacagggcaggaggcagaactgtccagaactttagagaactagagacctcccaagaggctgatgttggcatgccaggactacccagaggtcaccgttgagaggagttttggccattggtgatggcgctgtgaggagtaccctggtgcagttcccaccatggtcaagttaatcctgctgcaggttgccatgccagggcgggatggtggtcatgtggagaaaggtactcctgctctgctagtgtgttccaggctggtccagggcatgaggaggctcaggatgctggctgttgatgcttgtgctccagctatgttcttcccacaggtagatgccccctgacatgggcccaatgaagggccccaagtgggcaatgacaccaagaaaataggccatggtgggcatcgcaggcggggaagggcacaacttcttgagggcttggtggcatctcctcctaggtggtatatacaggaggtggagggacagcaggaagcaaggagccttgctgctggactgtggtgcaagtctgagttgacttccctagactgcccccacctagatggagacttcatattctctcgtctcctgcaaaggaaagagactgctgggagttggaaacttgtattaggtttgccaggccataattcaccttccctaggaaaagggaaaaagtgagagggcttggcaggaccctcagggttatctgcccaaagaagcaaagaactgggtcttggatagggtggcaaggctggcatggttacttactccagtctcgtaagttggattgtcaaacgctgactctatggtaatgcggttgtaggggcgggggcgggggcggggcagctgcagggagctttttccctggagcctgtggggcagagaagcctgcaagtcaggagcactgggtaggagtgaggtatgcaggtatgcagagcagaaagagaagccagactcacctggagaagtagaagtatacacctcctaccaacaacaccatcgccaccagtggcaagaagatggcagctgcaatgtgggcagcatccagggtgctggaggcagcaggtgccttggcaactgaagacacagagggtgtgactggagcagaggtctctgtcacctggagcccatattctctcacctctgcccaagggcatctgactaccagctccctctagctggctgggtgtagggaaggagctttttaacctgctaggcccaaacctctctctttctctgccctccctccttgggaagcccatgacctgggagccgtgagaaccaggaccagggagaccacttctctggcctcaagggtggagacttaccatccaggctgcgactgttgtagaacccatccagagaggctggaacaaaaggggagggccaagggcagtgagtgagcccaatgggccaaaccactaaggcagggagaggaggtagtgggatgatcatgggaaggatttgtccaaggagaggccactccagcatttgtcttggtgatgccaggtcagaaggatctggcagagactggggagaccaagggtaacatgaaggtggcatgggcaggtggttctggttctaaacattggacatctttgccagagcagctctatgggccagggagggttttgaggggtgacagggcactcaccagccctacagatgggtggggggtcactccaatgcgaggggtgcccaggcacacacttgatgctggcctggcccttcagcacatagccaggggcacacgagaagtggatggtggcccctgctgggtgtagctgcttctcaggacttcgggcaccattctcaggggcactgagaccatggcatggcttgagctgttccactacaaagcaggcagagtgcagtgagggtgtcatgcccttggcctccagggcagcatcttttatctccagctagaggttttccctcctactcaattgacacttacggagacatttaggggcccggtcactccacttggggctgccagcctggcgatcatggcaggtgaggatggagctgcccgtcagcacaaaaccctggtcacagatatattgcacggtggcccccacgggaaacttggggctggatatgaggcgtcggctgtgctccacatctccaggatcgtggcaggaagtcactatgggtaggggtgatggggagaagtagcccaaggagaactaagcagaggccaatccaccctggctttgttccaggccagctaacttcttcatgtcgtatgggtctaccccctacgtatctgtccctaccattatgctagtgtgtccccccatttgtccccttcccatctattaggttcgataaaaactgattggccatctaccaggaatgaaatacttagagtacgtggctgataaccccatgaaaagtatcatccccatttcacagatgaggaaactgaggctataagaggtgaaggaactttgaagatactagctaataacagctacagtctggttcagaatccaggagagaggtttggagtttgtgttgggaaggggagcgtggggaacaggtatactcacccctctggcatgagggcaggtcctcactccaagttaggtcccactggcacatgaggacactggatcccactacctggtagccagggtagcactggtaagtgaccacggtgccgtgcactagctcaggctgcgatgggctcttccagccattggggatctcaggcagctccggacatgtgtcattgcggggcacctctgggggcacagaggcacaagatgcaggccctcggccagcaccaaagtgactgtccccctcaccttgagggcactctggctcctgctagtttgtcctggacctagactgtcctgggcgggctcagggatccattcctccctgctcaagggcccctccttgactgcctgacattgctctgtctcctagattccagggttagcatttaagctttggccttacttccaaaagcaccttgaccagttccttaggcctgagagatggggccaggtagggtgagggaaatcgtcacttctatgaaagattgtcagaaagatagaagccagcacctttccttagttcccccatttttgtttgaaagttgttctggccaggtgcagtggctcacacctgtaatgccagcactttgggaggctgaggtgggcagatcacttgaagccaggagttcgagaccagccaggccaacatggcaaaatccggtctccactaaaaataaaaaaattagccaggcgtggtggcatgtgcctataatcccagctactcaggaggatgaggcacgagaatcgcttgagcccaggaggtggaggttgcaatgaacagagatcacaccatggtctgggtgacagagggaaactgtctcagaaaaaaaaaaaaaggaagaaaaagaaagttgttctgctgcctacccaaacccctcttgccactatagaattctggctctccctcagggcagatggagaacaggactagcttcctccaggtgatccctggtgcttttccagcttactcttgtctgagacagcattcaggcacctcactgccctagcctctttggcttgccatggcttgctgtctgcactctgagtggggtagggacaagctcaccaaagaagtggatgacgaagccctgctggtagcccagcactgaggtcccggggtccgactggaactgaatggtgacatcagccatggaggtaaagagcttgaagtggctacggggccctgagtactggcccagaacccgggccgtcaggtcatccccatcatagaaggtaagcacatcaccagggcctatgcgcagcctgtgaaggaggagcgtcagggcagagccggcctgggggcccgaggatgggctggacaagggatatccccagacctcaggagttggctcggcctgacccggtaggcactcacactcggatgtccagcatgatgcgcttgtcctcttccacatgcacaccccagatacaatcctgcccacgaccgtagggctctggccagttgggagagagtaccacgccagccgagtctgtgatctccccgctgcacacggctggaaggcagaggaggcccagaagggtcttttcaagcttaccatggtgttgcttaccatctgcccgcaggagtgcccacaaattgctgggaccccccacctcctccttggaggaagcctgaaccacgcatatcacagggcccctgtggccccgggctctgctgctattctcctggtatgaccctgccttttgcccggtaggcccatccactggtgtctactgacctcggcaggctggctctgtctcattccactgggggtcgtgggggtcaacacactcgatgatgatggagccctgctccagggtgtagccagggtcgcagctgaactccacagtggtacccacagggtaggtgggtgtgctgctgctgaagttaccgtatttgacaaagggctcatagcaatggccctgctggaaggctgtaaaccacaggtcccagcccagctcagccttgactggtattaaacacagtgggcaagcatccccctacttccctccccagagcctttcttttcctgggtacgaatgacaaatatatgtcctggggttggagcaggaatgtgatggaggagggacagccaagagcatccatccctattatgctcaggaggccatcttgattaccatcctgttcccactgcctggttttgtgcttagtacacagaaggtactccatacatgttttttgaatgaattaatcaatgcatgcatgcataaatggttctagaatgtctcttacagcaattctttcttaagggttgaggccttttttgcttttcaaaatctggagaatttattcccttggaccatagggcctgggtccaggcagaggtttcctgcaaagctgtggtagggatcccggacccaaagagaggggcagggaaagggggcctaagtactgagtgagcaggggctgacttggaaggagtgacagcatggaggcagagaggggtagggtgtgggagaaagaccctaggcccgagcccatccccgtggacccgccacccccagtgaggccccagcaggctcaccctcatagcgcagggccatgcctgcagctgccccgctgctgtcagtactgagctcaacaaagaagtgtttgccagagctgagcaggccctcaatgggcaggtattccacctcataggaatcatacactggtggggcctccacgttgtccccattgcgaatgatgagcctgaaccaggagagtggcagctatgtaggctggtggctgacccagatggggtgtggccccaggcttgggtagcgtccctccagcagggtattaccaggccaggcactcccattccactaggacagcccctcacctgtcatcatcctctgccagggaaaccttctcaaagtgcaggtgtagccgctggccctcaggagcctcaagcagccagtgacaggtgaggttgttgctgtagttgcccgggaagcctggagagacgatgcggccggtggtggcattgcggatcactccgccgcaagcagctgttaagaccaggacaggacgtaggctaggcccctgcctgaacccaggcagcctaacatgccttcctccctatcccagccctatatcctctgcttggagcagcggggaccttgcctccctgccatcttggccctcatcgtcctgaaggtcaaccttttagccctgtgaacctgcatctccaggcagcctgagctccagaatcctgccgcctaacctttcacacccctgggactgaccagggtaactctcttgactgtgggtagatgtatcactgcctggttgtgtgcccaggtaagtcactttccctctctgctgacttctctagaaggccgactctccctaggtagactttactaaagcccttactgtgggcttcaaccttcttggatacatctgctacttctacctcatgccactttcctaaaatcagttgtttgggtatgtcccttaactaggaccccctggagcaggaaccaggtctttccaggccaggcacagagttggtgttcagcgttggttgaataaaatgagtgaatgaatgtaaaaaggggttagcactagatccgggcggcaaacacctgatgtgcatgccatccgccccggcctcactaccactgccgttcctgggctgactgacctttctagtgctgaccctactggcttggggctgtcctctctttctaaggagagactgaacagtttgcctatggctatctgtgaggattgctgggttacttggccacaaactcctggcggttatgtgaggccagagaggggtcctcaggcaagaggagtatggctggttccaggcagtgctttcctctcctggacacatagctctgacctacccaactctcagagaccaggctgccatgaccaatacacaggacctttgtctccaaatgctcaaggcagcagaatattgtaacctagtaaagctcctggggggctggggcaagtttcttctctgcagaaaggacagacctgcctcggcttggtctcagaatggaactgcccttcaaatctgatcatgccccatcctttgctgaaaattgcttagtggctccccattaccctcaggatagagttaaagctgaaaatggtgttcaagccctttatgaatccacctctctctagactcagcttcagtcccctctccccgcataccctctgcttcaggcacacttcactgtgtgctcactatcttgtgctatttcatgcctgcacatctctgcatatgcagttccaggaacccaccccactttcccaaactaatatttctgaaatccttccatgctgtctccttgggaagccttgcttgcctcctctctcatcttggagtagctctccatcccttgggctcctccaccactctgcctttactcctattgtagcatcctctgcactgagctgcttgccagcctccccgctagatcctcgagggctgagaaagcatctgtgttattcaactctggttgtgcctggcacccaggaagaatttatagaatgaaataagattcatggctgggtatggtggctcaagtctgtaatcccagcactttgggaggccgaggcaggtggatcacctgaggtcaagagttcgagatcagactggccaacatggtgaaaccccatctctactaaaaatacaaaaaaattagctgggtatggtggcatgcacctgtaaccccagctactctggagggtgaggcagaagaatcgcttgaacccgggaggtggaggttgcagtgagcggacatcgtgccactgcactccagcctgggtgacagagggagactccatctcaaaaaaaaaaaaaaaaaaagattcaaaagcctaagcccatacccactaaaaagaaaaagcccggccaggcacggtggctcacgcctgtaatcccagcactttgggaggctgaggtgggtggatcacgaggtcaggagatcaagaccatcttggctaacatggtgaaaccccatctctactaaaaatacaaaaaattagctgggagtggtggcgggcgcctgtagtcccagctactcgggaggctgaggcaggagaatggcgtgaacctgggaggcagagcttgcagtgagccgagatagcgccactgcagtctggcctgggtgaaagagcgagactccgtctcgaagaaaaaaaaaaaaaaaaagcccaagttgcttttcatactgcaaaccaaacactgagtcttcctttctccaacaagccccttttcattggcagcaatcccagacctgatcactcaggaccagacctgggagtcccctttcccttttcccagttcccatcagtttctggaacttccctctgcttcattccccaaatcacaatctaagttcaaactgtcttgcctggctggcctcccagtcatctcctgaggaattctaaggccctcccttctcataagcttcaacagctcctcagcctgtatcttgccctgacactcaaggcccttccattgccacatgtctcaggcttcagccaaacctggctgtcttctgtgtccctaaacaccctcacctgcctgcctctatgtccctgcccacgttgttctctccatttaaatgtcaaacctgcagtgcctcctcccctaggaagcctcctaaatgtccagctaagaatgattgcgcccttgcctcccaggtcactttatgtcttttcattggtgctttttacttcttcccctggaaattggtgacctctgtgctttctcctttctccctttcctggaaatgtgggttctttgagggcagagtccctgtttaattcagctgtttgtacctgtggtgccttcatctggtagatgctcaataagtgcaggttggatgaatgccactgaggtgcatggccattttctggcttccttatgaagagcaaatgaaagtggcagagagcaacagagagcagggatgagcccccacctcacttctctgctcagcactgagccctttcccctggggcactcaccgatgcagacgggctcctttgaatcccagaagggctgggtggcattgagacaggtgagatgcctggcgcccttcagctggtagccagtggcacaatggaagcgggcactaccccctgggtggaggctggtgacagtcacatctccataagctggacgacggggaaagtggcagctcaggagataggctgcaaacagagaacgggtgacactgtgtatgtgtgcagggtgggggcgggagctgggccattggttgggggaggtctgcctcagtctgcctggaggtgtcatttggggccagaggaagcactaggagttccaaaacaactccaatctcctccctagaaggttaccagtgatatttccagcagcctgggctggttagtggagcagacagagctggaaattagaagggttaggttctggctcaagctttatgacactttaggcaggttatttaatctttgtgtgtgtgtttcctcatttgttaaatgaggtttaaaatcctagcctacctacagggttactgtgagaagaaatgatagagtattttatctagcttggtatctctggtacccagctgatattatatcttcaggaaatgcttattgaatgactcgtagacatgaaagcacttgaaatagtgaaaaacctatacagatgtaaagtgttgatactgtttttcctttagggaataaatatgaattgcagcagcaaagagtgaaatcagacagtaaaggctttcccagtattcactgagaaatgctaaaaagcttgatgccaatggccatggacttcttttaaaaccagaatggtggccgggccggtgtctcatgcctgtaatcccagcactttgggaggccgaggtgggcggatcacctgaggtcgggagttcgagacaagcctgaccaacatggataaaccccgtctctactaaaaatacaaaattagccgggcatggtggcgcatgcctgtaatcccagctacgggggaggctgaggcaggagaatcgcttgaacccgggaggtggaggttgtggtgagctgagatcactccattgcattccagcttgggcaacgagagcaaaactccatctcaaaacaaacaaacagccgggagtggtggctcatgcctgtaatcccagcactttgggaggccgaagtgggcggatcacctgaggtcaggaggtcgagaccagcctggccaacatggagaaaccccatctctactaaaaatacaaaaatcagccggacgtgatggcaggcgcctgtaatcccagctactcgggaggctgaggcaggagaatcgcttgaacccggcaggtggaggttgcagtgagccgagatcgtgccattgcgctccagcctaggggacgagagcgagacttcatctcaaaaaaacaaacttacaaacaaacaaaatccagaatggtggtaggctggggcaaggtgggaggattgcttgaggccaggagttcaagagcagcctgggcaacatagtgaggtccccatctctgtaaaaaatttttaaaaaatacccaggcatggtgatgtgtacctgtagtcttagctactcaggaggctgaagtgggatcgcttgagcctaggagtttaaggctgcagtgaactatgattgcaccactgcgctccagcctaggtgacagagtgagtccctgtttcgaaaaacaacatcaaacaaacaagaaaaagatggggacgagggtagggaggcagtgcactgccttcatggaagttggggaaagaacaagttgccctgggaaagctggtagctttggaattgtcataccaaatttgaccaaatggtggcagcaaatcctacaaaacaatctggcatatcccgatcctggggtcaagctggggtggtagctaaaaggatcaacccggtgcagtggctcacgcctgtaatcccagcactttgggaggctgaggtggacggatggcctgaggtcaagagttcaagaccagcctggccaacatggcaaaaccccatctctactaataaaatacaaaaatattagctgggcatggtggcaggcgcctgttatcccagctactcgggaggctgaggcaggagaatcgcttggaccggggagatggaggttgcagtgagtcgatatcatgccattgcactccagcctgggcgacagagtgagactccatgttccaaaaaataaaataaataaataaaataaaataaaataaaataaaagtgaagatccagctgggcgcggtggctcacacctgtaatcccagcactttgggaggccgaggcaggtggatcacaaaatcaggagttcgagaccagctaacatggtaaaaccccatctctactaaaaatacaaaaaaaaaaaaaaatgatctgggcatggtggcacgcgcctgtagtcccagttacttgggaggctgaggcaggagaatcgcttgaactcgggaggcagaggttgcagtgagtggagattgcgctactgcactccagcctgggcggcagagtgagactctttctcaaaaaaaagtgaagatcctggcttgcgtctaagaggtgagagcaaaggcctggaggggtcaaggagaggctgagaggcttgtgctacagagcctgataacccttggggtggtaggaaaagtgaggactgtctagactgaagatcttgggtcttggggtagggggcagccccactgatggtatcaggtaaatgggaggagaggtccatgcaaggcctctgttcctgggtgcctttgtgtgaatagaaaaatgggccctctttcttcccccccattaaaaagaaaaagaaaaagaaaaagaggctgtctcagggcagaccagggtccagaaatttgagttttatgactttcacctgtcctgttactatgtctgtgaaagtgggaggagaattcctcctcttctgtctctcatggggctctggagagaatggtcggtaagtggctagttgtgcttggcaggcagtacagggcagtgcttagcaggtgggctgtgggtcagactgcctgggtttgaatgcaggcttcttccctacgtgctgtgccaccgtgggcaagttacctaaattctctgtgcctcagttgcctcatttatccacccactttcagtattacatccaaggttgtggaggttaagtgagaagacatatgtgcagttcctgaacaaatgcctaagacatcagcctgctgttattgtttgtaatcttgattaataatagcacctcacatctacatgtactttccagattctaaaatgccttcacactcttctttcttgatgtctacaatatgcttgggagaaaggcaggcaaggtaggggctatgagcccattttcagatgagaacaggttcagagagaccctgtgccctcatcacacagcaaggaagtactagaccaggaacttgaagctcctgggctctgaagccttcttgctttccaccaccaccccacctgcttcctcatttgaagtagaaacttgggttcaggggtcagagaaatctgagagtaacagacaagcctgctctgggtggttgtccagggcagccactcacagtgacctggggagaggtcccagtccaggatgggatggagaaaggggtgtggggcaccacacccagagtggaggaggttaagaggttaactgacgcctagtggggtctagaccatgagccaggctcaggcccagcatttccccttacatcttcccctttgagttcttatcaccactctagtaagggagggccctcgtttcacagatgaggaaactgggctggaatggggtggaactgggctggaactgtaggaggctgggggcagacaatgaagcccccagactccatagtagttaaagtatcacttcccaggatgagcttcctcctgttgccatgacaaccgttcccggggagcctgaaccactgcaatctgttgagttattttctcactggagtctgtttctggagccaagtccagtgccaggaatgctgaggatgcaggagggggatgtctgtcagggccgtctgcctccccaccctgcctgaggctgtgggaggggagttgacttggtcttgcgataaggcccttgtgagggctcatccttgtgacctccaacatcagcttggacagctcgagcacaggtgtgggtactaggcccctcaccccctcttctggcaccctctttctctagcccacggagatttgcgtgtgagcacacgctcctcctgttcccatctctgggatcagggctaattacagcctataattaggggaattacactcattaaggcaagagctgatcattgacaaaaactgggctgacgagggagggcttctgggagctgagaaggaggcaggaccaggccagctcttccagcccttccttggaggttgctcccccttgctgggcctccagctcactgccattcagccacctttgtctggcccgacagagaggaggtccggagttttgtgcaaaggaatttgcagcaagagagaaggttatcatggcgtgaaattatgcctgctgccagggaggattgatgagccattagggaggctagctgggccgcctagacgtttcacccttgcctcagctggccccttgcctctgccaagccactctacagccccatccacttccaggctccctgctgctatgccagactgctccagtagtttgggtggaggggtgagggtagggtgagtgctccttaggtggggttccaagcagccccatctccagagtgctggctcttctgcccggctgtggtcccctgcaggactgcggaagtggtccatgacaatgcaagacaatcccttgattgttcacaccaattatttccgtattagttctccctagtctcaaatagttaacccatgcaaaggatcgagctgactttgtgctcagagagggggatgggtaggagggacacagctgagacagcggcaaagtcctgagccccttttcctccctctcccatcctgccagtcatgtaatactggtttccttaatgaagcatgtgctaagcacttgacatgtaccattttgcttaatcctaaccatgactttgtggggtaggtgttttggtttcatattacagcagaagggtcagagaggtcaaatgacttgtccaaggtcaacagccaatgaggagattcaaacacagatctgcccattgcctgagtctgtgattttttttcattacatcgtgctgctcccttatttccagaggtgttctgagctgattggggcatgggccaggtcaaggtgggtgaagcagttcaggaagggcagtctggcagctaagcagatggtcattgtcagatccctttgaccttcaccctcttgcatttggggagggcttctattgttattgcctgtttaagtgtctgcctcctcctgagaaagaactccttgaggacaaggaccttggtgcatcctgacattgccagtgtccagcacaagcctggcaaagagcaggtgcctaggaaaagtttgctgaatgaatgaatgagggacaacgggcacacctagaggctacctgatcctgagtcaagaccagctctctgcagggtggtgggtggaagagagaagatcctggaggtttcagatacgcgatacttacctccaattgtccagagcttcactggacatttgtgctatgtgtcactagcccctctctgctccttccctctaggatgtaattgcacagagacccccctccccagcaaggagggcagcgagtctgggctggttccaccttcaactacccaggccttaccttggtaatggaaatggaaggtgccagggccagccggtggcgggaggctctggaacctcagggccgcttggtgggtggggctgcggatgacttggccccgcagcaggaaagactggttggccaggggcagtgggtcaggcccccccaggccttccacagtcactgtctccccttcccggaggctgatattctggacctgtcagtagagtagagagagaaaagcaaagtagtcagacttcttcctgctgcctggatcctgccgccctcaggatcctgcaggccccgggcagatcaatcctcaatgctacttgagcatcggagcccccaggccctgagctgggcacttcagcagtgcaggagttgctcatctcagtgtgagacaggaccggaagttcagagattaagtaaattatccaaggtcacatagagattcttagcagaactggggtttgtaaacacatctttctgtctccaagcttttcagatacaccagctgcttcctgtcctgcccctccctgggctctgttttctcatctgtaaagtagggatggggtaggtgtattgaaccagatggtgtccgaggccctggtcagcagtatgaggtcttaaatatcagatccatgtgcccagcttcccctggacatccctgttggatgcttcacacccagcctgcctcatgctaggtgactgtcttcccctagccagcagttcccctgggaatgatcttgctatctccctgggtgtccaaatcagaaactggcatcttgcctcctccctcatacctggtcagtcattcagtcctgtcaactggatctcaaatctgttcattactcttcatccccactgccattccccagcttatcgccgttactgtgcacctagatcaccgcagcagcctcctggccagccttcctgcctgtagggcttaacccactcctccctctacagcagtattttctgaactatagccagctaacggtcttagatctgttgctgatcatggtgcttccttgtttaagtcctccagtggctccccattgagtctgtgaagccgataatatgtagttcaaactctttgcttagccctcaaggccctgcccaacttggcccctgctgactgtcagctgggccttacaccatgcccctccgcatgtcaatcgtgattctctcttttttctgagcctctttctccgatcctttcccctggctgtcacagtctcctctgctatcatgctgatcttcaggccctcagtcccttgagcatctttctgggctccatgcctccattcaggcaaacaaggattggacaacgacggactctgcccagagggaaattagcagcatggcttgatagaaggaacactggattgattgggagcccagaaatctgggacctcatcctaaccatgtgatcttggacaaatatgctgctatttgaacttcagtttcctcattttataaaacgaactagtggagttctttgctacttaaaatgtggttcttggaccagcatcagcagcctcacctgggaacttgtaagaaatgcagaatcttggctgggcgctgtggctcacgcctgtaatcccagcactttgggaggccaaggcaggtggatcacctgaggtcaggatttcaagaccagcctgaccaacatggagaaaccccgtctctactaaaaatacaaagattagctgggcgtggtggcacatgcctgtaatcccagctactcaagcagctgaggcaggagaatcgcttgaacctgggaggcggaggttgcggtgagccgagatcgcgccattgcactccagcctggacaacaaaagcgaaactccatttcaaaacaaaaaaaaaaaggaaatacagaatctcagacccactaaagcatactctgcattttaacaagatcctcgggcaactcaaaagcactgatctacatgggctcaaggttcctaccatgttgctctgaagcagggtttcaagggttgaccacctgggatggttaagtggcatcagtgagtcaccaaatccttcccagtcttatttcccaaatactccaatgggttcctcctctctatccttttgttactgtcctggccctaattacctcctgcccattacttttcacttgagaatggctttctgtctgtctaacacttcccatccccaactcatctcctgctgatttcagattgcctggaggacaagctccaaactgcccagctcacatttggtgccagtatctctgcggccctcattaacgtgcactgcagccgcagaccacccctcacttctgccccctgggcatccacatatgggactctgcgggggcaatatcttcccttcttcccctcctggtgaagctggtcatcttttcagatcttagggccgcatcgtctgcctcccaggctaggccagcagtccttctgtttcagactctccccactggcccctgcccatcttgctgttaaagcccagggtggcatgttgggtcacagtgccctcttcactggccagtctcaacaaagacgtgtggaaagagtaaatgtgtgggctgctggagagacattccccatcagatacctgtgagctgagaagcatagaggatgctgagcccagccaggtccaaggatatggctgctgcgaggctcagggcccctcagactgggtgctgagaagagatgtgccctggggactccagaaggggcagctgggcagggagaggtccctacccctgcctgagaggaaagacctggtgggtctttgggctgaagagaaggctcaaggcagggtgctggaggccgaggcgtctcctctctgtgagaaactctccacccaggcacgtttgggcggaggctgcctgaccatctgctggggacattcctcagggaattcctgcagcaggcggaggctggatgaggtcccttcaaacttggagattctgtgattctagagttgggaaaacaagactcacacacgtggaatctgtaattatcgagagatgccaggcagcatataattccgccttaagtggcactgaatgcaggcagcaggaatcctcggggggagagcgaagggctcagaggctcagggaaagtgcctgaagcaggtgggtctcagagtgccttgaagagaggagcactgggagaaggaggaagggaggacgctcactacagggaaattaccacgaaagcaaaggcagagaagtattactagaaattaatttgtattttcttcctagttccccatatacctctggcttgacctctagcttctttttcctgatcttgctgctttgggaccagagagaagctgtagcgacagagtaacaacagttgccatcatagagtgtgtcaagccttgtattgtactaagtgcttttcatcctcaccgtgaatctataagataggtggtaaaatacccaccagtaacagaggctcagagaagctaaggaacttgcaaaaggtcacataggggttaagcagtcttgctttgctgagacaaggcagctccctatcctcccaacttcatgggggcatcttctgtagaaataacatctagacatctttattcccaagctcagcacccccaggtttagcaaggaggtgggtcttggcttggcctggcttttttaagatgttgggatttgagttcccaccagccacccttgctcctagcagtctgtaaagctgggaaaactgagactgagacctctggccccctctggtccaggggaggcatggccctttcaagctggcctggctcccggcccagtctagtggtgagggttgggatgagagtgtggaatgaagtggctcctatccagaaggctccctgttctcaaccagaggctgtctgtgcagctctggtcccctgggtttcaagcaccctcttgtgggtctgctgcagtggctggaatgtaatttgtcacttgtttgagggccaggctgacagaggccagacagggctgggtgtcggacaggaggggtgatgaagtcttgatgcaatttgcaggcatctgtagagcctgggagacagattgaaatgtcagctctgttcttgagggctgtcttccatacccatagccagtgacaggaggggacctgggggccaggcagggggaagacaaaagcagagggagctgaggacaattcctccaggaccctgggctgtctaacactgccctgcttccagcagaccatggagtcagctcaaggaggaaatacagccactttgagaggctggccctttccaggatgggaggtgggaaggattcaggttgtcttctgccaacctctagctcaacagcctcatctgccctgtctgtccccatagaagctgtcagtcaggcctccagcacgtgccctaatggcgtaacccacagacgagatggcactacagtttttgtactcatttgcaccagtacaacccggcataggcagatgagctcaaagatgactcttgtgtgcgatccccacccccagatgctggctacaggtctcctaggctctcttggtcaccatcacctgtgtgtactcggacacaggcccacttacacgcacacagccccctcaaacgtgtcatggcacgtgcacttccaccccctggcagaaaataacccaccaatccaaactctcacactatgcctaggcgccaccaccaccctattcgcatgccctcacacacccgtgctccctcacagcaaccataggataatcacaattttcccacaagaaccttcgcagttttcacatccattatctcttcagctctcataaagtctcaataagggaggcagggcaggctgttttcctgcactttatagataagggaaccttgtaatcagggaagttgagagatcctctttggtcacacagtgagtccaagacaaagccaggactcgaggccaggactcatgattcctggtccagtgtcctgtcttgtgtgcctggcaaccccaggccctccccagaactgggagaattccaagtggatgtcctccagaatcaggcagggctgactgggaaagggcatctggggcagatcctgacaggtaccggtctccgcctgggtctcccactttggatttgccttgtgccacagacaggcctatctcctgggccaagggaagaacaggggcttttgagtcttggattgaatcccggctcaatcactgaccagttgaggggccttaggcaagtcatatgacctctctgagccccagttttgcctgtgaaatggggatagtttacctacttcatgggtttgtaaggatttggttagatcctgccagtaagggttttagcacagaggggcacagcgctagcagtcatctttccatttaatggggagatgtgggccacaccctggtaaaaccttggcatttgcagcagaaatgatagccggctatgaacttactttgccctcaggtctgccagggctctgcctgggaggcattgtaccttggagccaccctctccctggcccagactctgcagctgccaggaagcaagcagcagagccaagaacctgaggtgcccctgctcagtcaggcctataagggagcttgctgaccccagagaaggagccacactcaaagggactggctaggagaagcctggtgcatcatctggttcaatctccctttatagagaggtaaactgaggcacagagaaggccaggggtttagctcagtcacagagaggtgggctgcagagccaacactgaaaccccagtcttacaagacagactctgtgcccttctgaattggcacttatccagaaaaccttatggggtaagatctgttttagggatgaggacagtggccaaaatccatggggctagacctgactgcaccctgtcatccctcttggataagcctgcctagagccaggaaatataaagttgtccagaaattccacccaactgaccccctaccccatgcccacatcaggcctggtcctgacacggcttagaagggcagggtattctggctatcaaactgtcagctggcctggcatgggcgagctgtgtgccaacagagccacctggggcacgagggcagggactgtgggcagctgtgcccaggctccagatggtacagagagcagccaagccaagatggaggctggcagtgggaaggctcttggaatgccaagtgcagagagaggcaggcgccaggcccggaaaggcctggagccctcagggggagactgactgcctggggaggggctgggacccacatgggctgtgaggctcatgcccatccatcctgaaggggcttctctggacctctcaagaaagagcctagcccaatgcctgatccccagatgaatcaggcaagcctccttggatcacagagggcctgacctggcctcctccctgtggatggctcagaccttcagcctcagagggcatcaataactgcagcaccatcaaaggaggtgggaggcaggagatgaagcaggttatgagaggctgtggtccaagccatggagaatagggcttttagggattctggtacccctgaggctggtcctccaaaaaaagggaattgagagggtcttgctgaaggccccggacttgaggcaagggctgtggtctcatgctagggtcccagcatggtgtctggctgctttgctcaggggtatgatttgtgggtccctaagacagtcctctcctccatggctcctgtcactcttcttgcccagactttgtcccacctatctgccctgagtgatcccagtgaattcatagaggggcaggtggggaattctccatgatggagggaagccacaggcagtcccttctccccaagcctgaggagccatggggagctctgtaggccttccagctgcccacccatcctgcccccagtgtccagcatggcctgacacaactgtcagcctgggcagaaggacgctgctcttgggctgagcctctggcaggagtgtgatccggaagcccttacccttaccctccgcccctacacaacaaagccacctttccaaaacagccagggcagccttcaagggccaggcctgccgcacctgctgctgcccaggccagacttggctgctggcttctcatcctacaggtctcaggccaggtgtcatcacctccaggaagccttccctgacccccaggctggtggagtgtgcccgtcctgtgcttcccatccccatccctgccagcactgggcattccgtggtcattgtttatgatttctgtcttccctactaatcatgaaggtctgtgtccccagtgcccagcgcagagcatggcacatagcaaattctcaatgtttgcttgtggaacaaatccactcaacaaaactaattagtaattaactgactgacttttggcaagtcccttttcttgcctgggcctcagtttttccaactctccagtgggtattgttgggtagtgtcagaaattcttcaggtcccaagtggcctgggtgggggtggaggttgccagaactggccctggaagaagagccttaaatcctgcttagttctggctgattctttctcttgctccttccccaaattgggtgctgaccccgctctggccaccctgtgcccgcctcccctccatgacttcagactatctcaggccgtccgggccgacagtgtccccaaggaccctgcccccatggcaccgaggtggagggtggggccagcatctgccacatttcctgacagcaatccagggctgtggcaggtcttcgtctcaaggttgcctggtaatggcttttgcattctgataaaagaaaaaaaatgtggcagcaccagacaacagacacggggcttatgtgaggggtgggcatccagcatggggcttgtgcctgggccagagagggggcaggcagagccagcatcttgctccattgtggagggtgccagggctgggctcagccttgtccagtgggcttcagtaggggtggtaggcttggggggggcagacagagcctcccaggcctgtaggggggcactcagcctggcacctgccccctcccaccccctttcccacacctgcagctggtgctttccacccagtgagccacagccggtgccacctctcattaggtgatgattttacattaattaccttaattaagcggtgctgagtgctaatggcttgaggcggggtggctgttcctaattaccctcccagtcagcccagagtgaggggcacagggcttggcagagtaggaggaaacagttgtaggaagaaggggaggggcccaacaggggtaggagagggtccccctgacagggtctgattcagatacctggacctgacatccccagaggggagggctggaggcactgccccaagataggtctagacggcttcagtccccaatccagggacatgcaggaattggaatgggcgggaagcagaacagaaggcagggagcagggagcaggacacacttctcagcgccctgccagattccctcaaccaggctgaatgcctctcttgcccactcctggtcagtctccaagattcaagtcaaatgtcatcacatcccttccttcctccatccctttgtccgatcattcagtcagcgcatggagtacccattctgggctctgcactacaaggcaccccttaaggagctcacagtctagctggggaggtggacagctgtaaacagttggatggaaggcagactgctaagagctaagatgggggatgccccaggctttggggatctgagggaattcccagagagggtgatgccagggccaagtcctaagggaaggcatcatgggatgactcttccaggcagagggaccagcatgtgcagctgggacttgggaaagaaggtttggcccattcagttagctgcaagctgtttagtgcaaagtgggggtaaagaacaagggacgaagtgtctaggggtggacccagagagactgaccttgattcaggagcccttagagaggtgtagggggcaggattgatttgagaaaaatgactgcagtggaggtggagatgggtagagtagggagcaagtgtgggcggggtgaccagtgaggcagctactgcatcatcaggggagggatggtggggtctaaaccacatgtggttgtggggatggagggagagaagcagagagatttagaggggagtatcatggtgacagaatttggggatgaattgatgggactgggggaagagggacagggaaaggctaaggagaccccatgttgcacattaagggacaccatccacattgcactatggtggttctgctccaggtttctgacctggacaggagtggctttgggggaacaaaaggaagatttgggtttgtggaggttgaggagcctgtgggacatctgtgaggacctgtagcctcaggcctcgggattaagagaaagtcttaatcctaacggagggatgagataacccagggaggctggggacaggaggctggcctgtagatttgactttcctatcagctgatcacctctctgatggtgtaatcaggtctgtcttcccccacctctgcatcccagaagccagcacagaacctgacccagaggaactgctcagagaggatttgctgaatgaatgaatgaatgagtgaagctccatgactctctcaggcccagcgaggcagccctgtgttctctgcttagcccatagattcagatgtagggtttatactcacccagtcccctgcccatccaaggctagagccccctcccacagcccctcttggcttaggccattgccaaacacacggggcagaatctaaccatttaggcccatctcccagccctggccttaggcgatgccccacaattgatgcccctaatcatccccacatcctctcatagcatgtgcctctctgaagaaagagaatacacccgccccagctttgcccttgccagatccagatcactcaccttgatttccacgccatagccagggtagacagagatgtagaagaagcagtccaggccaacatcagtgggggagctgaggtctgtaggggagtccagagagccctctgggcctgagaaattccagctacaagggcctgggaggcaggaggagacacaaagctagtgccagctctggtgaagtggtccaactaaggctgaaccgtgtgtgtgtgtgtgtgtgtgtgtgtgtgtgtgtgtggtgaagaccacctcttgtgatgtctagtctcctgttgaaggaaggggaccaccttttattaggcacctaccatgtgcaatcttttttttttttttgtatttttagtagagatggggtttcaccatgttagccaggatagtctccatctcctgacctcatgatccgccctcctcagcctcccaaagtgctgggattacaggcgtgagccactgcacccggccccctaacatgtgcaatcttatctcagttttcacagtagctcaatgaggtttgttttctttctttttttttttttttgagacggagttttactcttgttgctcaggctgaagtgcaatggcgtgatctcagctcactgcaacctctgcctcctgggttcaagctattctcctgctcagcttcccgagtagctaggattacaggtgtacaccaccatgcctggctatttttttttttttttgagacagagtctcgctctgtcacccaggctggcgtgcagtgacatgatcttggctcactgcaagctctgactcccgggttcacgccattctcctgcctcagcctcctgagtagctgggactacgggcaccccccactacgcccggctaattttttgtattttttagtagagatggggtttcaccgtgttagcaagggtggtctcgatctcctgacctcgttccacacgcctcagcctcccaaagtgctgggattacaggcatgagccaccgcgcccggccaattttttgtatttttagtagagacggggtttcaccatgttggccagactaatcttgaacttctgatgtcaggtgatccacctgcctcggcctcccaaagtgctgggattacaggcatgagccaccgtgtccagccagaagtttattttcttattgccattttacagatgaggctcagagatgagatgttaaatagaattcctagggtcatgttatagttggaagaatcaagattttttcttttttgagacagagtctcgctctgttgcccaggctggagtgcaatggtgcaatctcagctcactgcaacctctgcctcccaggtttgagtgattctcctgcctcagcctcccgagtagctgggattacaggtgcccaccaccatgcccggctcatttttgtatttttagtagagatggtgtttcgccatgttggccaggagggtcttgaactcctgacctcagatgatccactggcctctgcctcccaaagtgctgggattacaggcatgagccactgtacttggctgaagaatcaggatttgagctcaggtctatctgggtccaatctacatgcctcctgcaggctggcccttggtgccaaagggcagggcaggctggcacagtgtcagagacaggcttttaggggccccgcagcctcccccatccccatttccacatctgcaagccagcaggtagctgacctggtgtctggactgtggtgatggtggtggtgatgatggtggtggtagtggtggtctcctcatcatctcctgaagctgtggaggaggtgatggtcccctggatcccgatccctgcgccctgggacacaacctctgcaacccacggccttcccatgtctccaggaccctcttgggttggtgtccaggctctgctggggggtgtagtgctggctatctcccctgggcctagggtgggcactgccatgctgggccctggaggtaggggagctgtgattcgaagcataggggactctgactccggactccagggtccctccttggactggggctgagtgggtaccgcagccatggctggagtggggctggtaaagacagggcggctgtcctggttggccaggcggggaaggggacttggggtgaagggtgcaggtgggtcaggctggaagggcagtgctggcctcagctcctcatctcccttttccagcccctcttgtaggaattcctcaagcagcgggtggtggttgagcagcttcaaggtgggggctgttgtgacaaagtggacgcctcgttctggctgctcaggtgtgggggctgctgtcagctcgccatctgtctcctcgatgcctggggcttgtcctttccccacggttggggcctctaaagagagtcctgaaataataagggatggtcagaggttctccccctgctccagagagcagcatcacgcccaactcgagtagtgggggggcccgctctcttttgacagacagccctgaggagcgtgctcactgctgagaatcacggaactacagaatttgtgaactggaagtgaggtgctattacatacttcaagggtggcacatgagatactctttctcctccagcaccagaggcaggcatttctagcccatccgtgcactatttcctactgttctcaggttcagcctcagaatcctcctcaacacagcactccacgaggtcacacctgacacctcagactgacatgacaaatatttgccatccctaatgaagagcagaggccttattttactagtgaggaaataggccagagaaaggaagtgacttgctcaaagtcacgcgaccagttgaattgagatgaaaaccgtaagtgtgtctcccaccacagtgtctttcctgtctgagatgatagggcattcaagttcatttcctgttctcagtgaacctgctggtcattagcctcaggaaatgcgtcacatatttgggattttattttagatttcctcatggttgcatgacttctttttttgtttgttggttttgagacagtgtctcgctgtgtggcccgggctgcaatgcagtggtgtgatcatggctccactgcagcctcaacctcccaggttcaagcgatcctcccacctcagccacagtccccacacccccacttctagtagctgggactacaggtgcatgccaccatgcctggctaatttttagaatttttgtagagatggagatctcactatgttgtctgggctggtctcaaactcctgggctcaagcaatcctctcacctcagcctcctagggattacagcatgagccaccgcacccgaccatgggtgcatgacttctttgttaggggcccagtagtttctctccgttctcaggaaatcatttcttttgtactcatttctgtttttatggtccttctagagcagtaatatgagtagagtgggaagagccaagttctggagctaggcagacataacttcaaatcccagatccactactctagggctgtgtgccctcaggcaaataacccaaactctctgaagctcagttttctcatctgtaaaattgggtttcctttttaggattgactgagataatattacatcccgtctctatttgatatgtccccctgagttcccttaatctttctggtgacactaatcaggttccatctagggcagggtgaaaaacaggtgtagaatggaaatctagcatgctacccacccactccctaatccatggcaggcattgctaatcaattttggttatttcttgctaaggccacctggtccttagcaacttccctctcacaatgttattcaggcagccactaccaatcaatgagattggctctgggggatgaaactgatttgctatctctggtctgaggtacagattgctctgctattgattgtgttgacttattcaaccacatagctggagagatgatgcatattctgcttgtggcccattcggctccccagatccttaactgccaagaaaaggtcaatgaatgctggctccagattcagctcatacagaattttgccagctctgagaagcctgggaggatatttctgatccttacagctctcaaaatggctgcatgaggacttgaagggaaacacagccggggtgagatcacagagtttgcaaggagaaggtcgcttcctccgcacgtctggtggtggggctgtcattccagaggctcacacccactccatagattggcaggcatgaggaagcagcagatggcctacgttctgttcaggagaccatagcagctctgatgtgtcagacaaatgggaggagggaggaaattgggtgggggaggtgggtacaggttggagggctctccattcttctgggtcagaggagcttgggcaccccacatccctgagaaaccaggaccaactgctatctcctgagatgcccactaaagcagcccatctgtgtcttggcattgtgtgccagccactgacaacaccatccaatctagatgtccagccaggcccacaccccccagagcagatggtccaccagtgcctgtctttcatctgaataagttacggaaggtccaggcagtgcctgtgacatgccagaacagggctcctctttttgcccaccccccagacatcacacaggctatgccaggtaagctgagactgattctagcatggcgcaaggaaggggggcttttctaatcacatagattggagccccctggatccgggcattgtttatgcggcccctttccagagtacccaacaagagatgtggcccttggctctcagagtaggtacctgtgtgactcttcctgggagagggagtgcacagagattctctaattcaggaagtgtccagggcaggcacagctcttcccgctggctgccaggtgggtgctgagcaatggagcagcactaatgggcacctcccatcactgtcgattgcactgattgtgctatctgggatcgagatagcatatcaaacgagcaagttgattccaaaatcagctgccacttggtcccagcgggtgccacccactgtcatagagggtaagataacctctgggagacaagccatttctggggagagggcatctccagaccccctggttgactctgttggaggcctgaggccctgagacctgccccctagtttcccaggattgtggccagtggataggggcttctctctgcctgggctgactgaattcaggggtgcagggactgacgaagggagagtatgatataggggacagcagaagaaggtgtcaggggctctaatgcccagtctcatcaggcactactgtgtcaggcccttcccagaccttgtatcatttaatggatgctgcgcctctgggagatgggaattttatttccattttacaaagacctgaagcctagagagctgaggcaaggactcgcctgaagtctcgcagtgacgcagctgggatttaaaccttcgatgatttggcttcaaagccctaggtctttccacatacccacctgcctcatgggaggggcagactggagctacacagcagacaacactccagccagttgaagaaactaagtccagggagaggcacggactcgtcgaagatctcacgccatttagaagtctggggccagagcttctggcattgggacttgggttgggccctggtcgagcaggccctcaggaagccttctggctgggacccagggaagcccccaccctgtgcctgaagcacatctgagcctcaaacccaaaccggagacccaacaacactgctgtgtggggccagggcacagagccacacagacctgggttcaagtgtcagttctgccacttaaaagtcatgtgaacctggcaagttgcctctcagagcctttgcctcctcagctataaaatgggcactttggaagggttttgtgtgaatctgcatgctctgaataggagagttctgaaggctgagggagaaggccacagtcagaggttaggcagcccctgtcaggggaacactgaggcaggcttctagggtaggaaggggtggcccctggcaggtagggctctctcttctctgggggactacccatgttccatgttgggtggcagcatgtgtgaccctgaggatgtcaaatacctcatccataaaacaaggataatactgcaccatgcaaagggcgaccaccttcaaggccctgcatgtcggtgggggacacagcggtgggccgcagcaagatcgtccccgtgatccccacttgccaggcccacctggtgccagaacacaggatgcactccgcagttgctcagtcctcccctcccgcagggccgggggctgcattctccgagtgggctgggtccgggaaacacccctcccttccccgcgggccatccctggtggagactgcccaggaacttcccagcgcctgccgcccccagccctggcatggccccgccgccgcctgggccctccccccgcattagctcttaagctgtgcaaatagacatcggagggagccctgtttaaagtatttagacgaaatgaaaaaaggctttcatcggcactaatgagccattcaggatgcctccccggtggattctctcccgctcccgcctccctgcccgcgccgccccgctacggcccctcttgggattggaggccccttcctcccaaccccagcctgggactccctgggaggaccgcttaccccgcctcacttcccagggcccagctgggtgagggtggagcggaggccacctgcgccccagccccaccagatctggatcgggatggggggcggggcccagcctgtgtttaggggaagccttaaggactggggcgtgttctagcgtccagctaggtaggtgttatggcctctgtcttatagatggggaaaccgaggctcagtgaggcccaggagcttgcccaggttcacagtggtggtgtgcggtggagctggagtcattacgcagtgccccagcctgggggaaccgccgaaccaggcagtggtgccacctcagggccagctggcttgccccttcagcgctgctgtttctgcagatctttctgtaccagtcagccagaaagccttgggttccaatcccaaatcgatgtgacactagctgtgtgacctgggcgggggctgcccactcaagcctctgtctgctcatctgtggagtgaagacatactgggtttggggagagctcatctatggacagacatatactgtcacccaccgcagcctctggaagggcaggtggcactgtctgtcactctggcagcccctgaagaggtgccaggcatttcccaagcctctggcccctctgaggtgggcagtcacgggaaccaaagttctgggacgagttcaggcctgatccccgcctcatggcagcaccaactgtcagcttcgggggagggcatgacagcgtgtgggtacaagggggagcctgagggacagggcgggcagggggcccactcctctgggttccagaggttaagctggcccagcacggggacaatgagaatttaatgggatccatttattatcccataaaagttaatgagtttattctgaaggttccctggcccctttcaagttttaataggggattagtgagggcctggtccctgcagacccctattatccgagaacctgagggagctgagagtgcttgggccccccagagccagagtccctccttacagtgacaattccacgggcccagccctgccctctgtactgtgaggccccagctagaggctggcagggctatatagggccgctgggatctgaggcctagttctagaggcttccaattccatgcgcaactgaaataattaccccgacagtgtccagcacctgaggcaggtttgctgctatccatctgcttgtattgacagggaaagcaatataacccccatgagacagataaggaaagcaaggccctgagcagggatgtggctcctccaaggtcacccagaagctatggctgagccagaatggacacattctgtctcctgtggttggtagccaggaaactggggctggtaagagctgccattcacttactcggtgcccactgtgtgctgaccatgcactcagtgccctcatacgtaatttctcattctccccttgctccagggaggtttgggacattatcccaagagatgaagacactgaagcccagaatggttatgtaacttgtccaaggtcacgcagctaatgatggcagagcctcggactggaacccaaagctggacagccccatagctcagctgtctactgctcttgctggctttcggctgtagcacctggggcctcctatctccccaccaagctggacaccactatcctagcgcactcgtgccaggagccctgcagcttggatgatggggaagggtgttctggttgtgccctggaggggcagttgttgggttggacacagagatacactcaaaaggaacttctcatcgtcagaacaggtgccttccccgttttggccccaattgctcacgcgattctctctccttgccatggcttctctactcctttgtctctgcaaaacctccccatccttcacgggtcagttcctagcctcctctggagatccatccttgcctggcccttctcttgacctcctgggggcacttcctagtgggctcctaacacatgaatggcttgtgtccctgggcaaggatccagcagtgggtatctctcttcccatttctctacctggtgctaggcatagtgaaggctgggctcagggcacactgtttccaagccccgattctgcctctctgcacactcagaaggcaacctgctccccaaagtgcctagcccttggccagcaaggtgagcaggagtgggtcctgccaggagaagatgggcagccagcccttggccatgccccatcacagccccaactggcagttgatggggagtgtctgctggcacaagctgatgggtccccattgccccggactaccctctcttcccctgccactgatcatccccatcacagcctctcaccaccctctctttcttggtcaacccctgcagtccagtcaaatttggattgcaaatatgaatgggggcacctcctcttggccaggctccaagtggggcagtggctggttcccagaacatgagcccttgtagcatctcatccctccctcacttacccaagaggaaaccaagtccagggggttttcccaagtcacacagcaaacttggggcagggttgggactcaggatggggctgggacatctagcccaactactgggaagagtgaaccctccagtctggagctgtcttttatctgtgggcatacctccagggacagagaccccactgcctccttagccatcctggttggggacaggggtaactgtgggctttggcatctccagagttggggtctcactgtcacatggagggagcatgggtggaggtagtgggcaccagctaggagtcaggccatgctatcctcatcccacccctgacaagccaggtccctcagcacaaatcacttccacaacctgagtttccatatttttgtcagtaaaatgggtccctgccagttctcacattccaggatctagtgaaccatgaagggctctatgaataaaaatattgaatgctgctgtttactgagtatacatttaccacatgcccagcaacactctaagtgctttatcagaattaatccctataataactttatgagatgggaacttttattatcccattttgtagatgaggacactgagacccagggaaatgcattagcagtttggatgctaatgcagtctgattcaaacctgggttgtctagcctagagcagccctgtccaatagacctttgtgatgatggaaatatttttatttatttatcttatttttagagatgagggtcaagaccctatgttgcccagactgggcttgaaaccacctttgccaaaattataatggtgagaaaattatgacagtgaaatagatgtgatgtaaccaactccatcttacctttaacctccagactgcccttggtcattcctgggtatgggccaagctaactttgggagaaatttagtttatagtttaaatgataatagcccttcccaaaactaagccaccttttaaaaactaatgaaagaggccaggtgcggtggctcacacctgtaatcccagcactttgagaagccgaggtggggggatcacctgaggtcaggagttcgagaccagcctggtgaaacaacatggtgaaaccccatttctactaaaaatacaaaagttagctgggcgtggtggtgcacacctgtaatcccagctactcaggaagctaaggcaggagaatcacttgaatctgggaggcggaggttgcagtgagctgagatagcaccattgcactccatcctgggcgacaagagttaaactctgtcccctgcccacacacacacaaaaaaaagaatgaaagaccaccaggtttggaggctgagaggggcctgaattctgctgagatgtaggcatagttagcagccgttattctggaagtcacaagatttgcaactttcccaattactcctgtaaataacatcactatagtagaacctatgattggctttttgagatgtcttttcggacttttgcatttctttttttctttactctgtcacccagactggagtgcagtggcatggtcttggcttgctgcagccttgacctcccaggctcaggtgattctcccacctcagcctcctaagtagctgggattacaagcatgtgccaccacacccagacagttttttgtatttttagtagagatggggtttcaccatgttgcccaggctggtctagaactcctgaactcaagcaatctgcccacctcagcctcccaaagtgctgggattacaggtgtgagccactgtgcctggcaagacttttgcatttctgttgacaagatggctccacctggctcaagactcatgactcccgggtcctgcggcccccacccagaagtggactcagtgtaggaggaccattttccagacccctatgatttcatccccaaccaatcagcagcacccattccccatctcccggctataaaaaaaccctagcctccttcaggcttgaaagaagactcccgaataatagtaataataatataataataataaaagtaaaaaaccaaaaaaacaccaaaaccctagcctccaaatattcagggaggctgatttgagtagtaataaaactctggtctctcatttatttatttattaaaaaaaattttttttgagacagtctcactctgtcactcaggctggagtgcagtggcatgatctcgtctcactgcaacctctgcctcctgggttcaagcaattttcctgtctcagcctcccaagtagctgggactacaggcatgtgccaccatggccagctaatttttgtattttagtagggatgaggtttcgctgtgttggccaggctgatctcaaactcctgacctcaggtgatctacccgccttggcctcccaaaatgctgggattacaggcgtgagccaccactcccagcctccatttatttatttattgagacggaatctcgctctgtcaccgaggctggagtgcagtggcacgatcttggctcactgcaacctccgcctcctgggttcaagcgattctcctgcctcagcctcctgagtagctgggattgcaggcgcccgccactacgcctggctaatttttggtatttttagtagagacagggtttcaccatgttggccaggctggtctcgaactcctgacctcaggtgatcggcctgcctcggcctcccaaagtgctgggattacaggtatgagtcacagcgcccggccagtttacatttaaatagccacatgtggtcagtggctaccataatggaaagtgcatatccctacctgacttctcagccttacagtagtcacacctctcagtgaggaagagcccagggtggggctcctggaaaagagttaagatggggtgtctgctcccctcctttcgggtctgggaaaactgcggcttgggattggcagggagagatgacaaggagccctggacttcttcgagtttttcagaaaggcctcggggaactgggcgtagcagctactcattcctcagggaggattcttgtcatccaccgatgaggtttgcttcccaaacttggccgcgcacaggtgctctgagggttggatgtatgatgggcaattctggaagctcagagccagtttaggaggattttatgggtggaggacagccaggaacacttagcttcgtactttgccctcacatgtgtgttccaggggaacgtttgctgcgctctgttggcttgcccctgcctcactgcccagccagcagcaccgagggcagagtatctggcctggctactaccccagagcagctgcctggcctcgggcacaggagaggcactcacatttactgagcacctgctatgggctagccatgcacttcacaaagagctgtcttccacctagagtggcagccctttgtgcttggaatcaatagtttatgcttggcctatgaagaaactaaggctgagaggcaaagtgaatcctcctagttcacacagaggaaagtgacaaatagagtttgaaccgagtctgcctgttccatagcctgggatgaaaatgtctactgccttggctgctgcttcgtgtgagcatgtgtgcacgtgcgtgtgtgtgtgggcgtacgtgtgtgcatgagaccgggtgtgtgtgtgtgtgttcaagtgcatgtgcatgtgcaggtccaaatacatgcctgtgccacaagtcactaccatgtgtccctgcccaaggatgccacaccctgggacctggcttcaagcagtccccaagcccagaaaggccctaccccccaaaagaagggatatatttctctccaagctggctgttgtgcccctttttcactctgccctctccttggggcctgacctgacccgccccagggccatctgtcctggacagcgtctcaggctctgggtgggtgggggagggagagactagttggggctgcggctgggccagtcctctctcctccagtgtcccctccctcccatgaggctgtgaccaggggcccagggtagagagctcccagctaactgccacgttctctgcttttcaatttacagtctaatatggtctcgccactgcagagctgggggctggagaggtgatgaatgaggcctctgctcctgcgtcacctgctgcactctacaccgtcccctgcagacctgtgttcccttctcctgtttgcctgctggccctggggaccccagccctgcctgcccacagttcctcagactgggcaggtggcactggagctgggggcctggagtgggggttaggtgagagggagggactgaccttgaggtaggggcaggaatcgaccccagcctctggggtaggatggaaggaatggtcttcttggcatcacccctcaccagtctgataaataatcaatctgctgtacctcaccctgcttatgccacctcccaggagtgtggccagggcagagtcctaggtagggctggagctggggactgggcttcgttctctccctggaggcgtttctgtccatcagctccttctgtccatctgctagccccaggccccttctcctacctgctatgttaggaggcagagaatgaggagctacccactggccccaaggtgggggtgtggagcaagtgggcagaagtatgtggccctgagctgggtgcgtgactcacagccctctccctgtgccagccacttctaccaccaccatatcagcagcagagaccatatttctctgaatggaaaatcttggaggtgtcagctgggacaaggaaggatgtggaggcaggagctgcattctccctagagccagtaccagggtcagctctgcccagtgcagtggtgaagttgggggacaggggttgatctagggaggaatagcatcccctccatcctttgccctactgcctcgctccacatacccaacaaagacagtccttcctagccatggagcccagcaagacagggccatgaggtgccagggccggagagtaggttccttcctgggccccaggccagcatctttggactactgccccctcccagcctctaccctgaggttcaaaaggccacaccactgaggctgttccagcacacgtgtccacttttgagctgaatcaccggcctggcagccccaagcctctgtggcctttgggttagatgaaggggcttgttttgtgcaccaggaccaaagttacctccctgactttgtgacctttgccctgtggttacttttgtctgctgcatctgggaggagatgaagttggagagcttgactgtagatggaggggccctaagcccagacccctgggctaccctgatgctgaggtgagctctggccactccctaccctgaaagtccctagcatgtctgttcttaggtgtggaagctgaggagcctggtgaggccttattagaaggcctcgagcatggatggagctctgccactgacaggctatgcgaccttgggtttgcccggcctctctgggcctggccggtttttcacacagtatttggttactgactttttttttttttcctttttggagacggagtctcactctgtcacccaggctggagtacagtggcataatcttggctcactgcaacctctgccgcccaggttcaagcgattctcttgcctcagcctcccgagtaggtgggagtacaggcgcctgccatagtgcccggctaatttttgtatttttattagagacagggtttcaccgtgttagccaggatggtcttgatctcttgacctcatgatccgcccgcctcagcctcccaaagtgctgggactacaggcgcccgccactgagcctggctaattttttgtattttttagtagagacggggtttcaccgtgttagccaggatggtctcgatctcctgaccttgtgatccacctgcctcggcctcccaaagtgctgggattacaggcgtaagccaccgcgtccggcccggttactgactttttagagagtcttttgggtgggtgggacatagtcactgaccctttattatcggtgctcaaccctgggggctgatggagcctccggatgggcaggggtagaggaggagggggcttggcatggtgggggactgtgctctgttgacttgccacttttcttttcttttttttttgagacagagtctcactctgtcgcctaggctggagtgcagtggtgcgatcttgactcatgcaagctccacctccagggttcactccgttctcctgcctcagcctcccgagtagctaggactacaggcacccaccaccatgcctggctaattttttgtattttgtagtacagacggggtttcaccgtgttagccaggatggtctcgatctcctgacctcgtgacccacccgccttggcctcccaaagtgcttggattacaggcgtgagccaccgcgcccggccgacttgtcacttttcttttgagtgtgctggagcctgtcacctcatctccctctgctgagcatctgcagggctaggctgtgtgtatgtgtttgtgtgtctgtgtgtgtgcacatgtgtatgtatgtaggtgtgtgagcatatttgtttgtgtgtctctgtgtgtgtgcatgtatgtgggggggggtgcattaggtgaggaataggagtcagggatggaggtgtgagaagagggcctggagagagcgctaaggtttctgggcagctgctgtgtgctagactccatgctgccccatcatctacaccatctgattaatcgtctccatcccgcaggtggagaaacagggtctgagagctgacgtgacctgtgggaggtggtctagctgggcctgggaggcagaccctgggcatccttgtcctgctgagctcaagagacagacagaaggacagatgcaggaannnnnnnnnnnnnnnnnnnnnnnnnnnnnnnnnnnnnnnnnnnnnnnnnnnnnnnnnnnnnnnnnnnnnnnnnnnnnnnnnnnnnnnnnnnnnnnnnnnnnnnnnnnnnnnnnnnnnnnnnnnnnnnnnnnnnnnnnnnnnnnnnnnnnnnnnnnnnnnnnnnnnnnnnnnnnnnnnnnnnnnnnnnnnnnnnnnnnnnnnnnnnnnnnnnnnnnnnnnnnnnnnnnnnnnnnnnnnnnnnnnnnnnnnnnnnnnnnnnnnnnnnnnnnnnnnnnnnnnnnnnnnnnnnnnnnnnnnnnnnnnnnnnnnnnnnnnccgtggaattgtcactgtaaggagggactctggctctggggggcccaagcactctcagctccctcaggttctcggataataggggtctgcagggaccaggccctcactaatcccctattaaaacttgaaaggggccagggaacctccagaataaactcattaacttttatgggataataaatggatcccattaaattctcattgtccccgtgctgggccagccacaccccagctaattagctccagccttatttccaaatggcttagggaggagtcactggaggcctgggctctgcccttagggacttggcgaggttgtagaggcagagggaggtcatcgtgggacctctcccatcggcatgcaggaggaatgagcttcgcctgccccagggtgtgggccctgagcctgtgggctatcccaggcaccttttgcctgaggggaaggggccccgcccacccagcactccagcccatgaggctggcctggcccttcacttccccagcaaacctgagtgggggaggggaggggtgcagagctgctaaaaatagctgcagcagctccagctatgagtctccttgaggggtcagtgaagcccaagattggggaggaagagactggagtgggctgcagggagggagagagaccagcctgggctggggcctggtgtaccttacacccaggccacagtcctaggatgcagggacagagggcacagacatgcagggacatgtgaacacagacactcaaggacaggtgaacgagccaggcagaaatgcacgtagacatggctaccagcacaactggggcttcctctccccagaacctcaggaacaccagatgggcccaactgcacagcccccagcctctcaggcctgtcccttgtctccaccttgttttgacctccaaggaccctgcagagctgggtgtgtggacaccttgagttgacagggctaagccctcctcccttgtctctttcagtctcctgtgtgtgcagcttagggtagggaaggaccaagggtcaccggaggcagcatcagggatagagttacagcacagaccagagttagggcaccaacaagtggctgtcggctcaggagcatcactcgacctgagcaacaggctctttctatcctggctggcaggcagagggaggcatgggagagaagtgattggacccagtagggcaggactggggctctgccaggagatgcgtgggaattgagggaagggggccaaggggatctagagaagtaaatgcatggatgaccactctcgtgcatgcgttgtttgatcccacattcacacctttgcccggagatgccccctttgccaggggctctttggtccacaaaagttgactccatgtcttacctttcctctaaccagccagaaaatagggcttcatgacaagagggggcctgccagctgctggaccagacatttcaaatcaccagcatatctctttgctagacgtaaatgatgcctaagacaatgtccatcagagcagcaagccagggtgaaggccttagaagcaccctgatcttggtccctctgcattgctagtctcaccttcttggacagacccaaaccagctggcgctcacccccactgctgcctcagcggtccagctctggactcctgggttgtatgattcagcccctccagagatgcctgacaaatcagcctctcctggtgatggacagttctggctgttggaggggctcctctcaaggggtcttgtggtttcttcccagtcaccatcccccccaccccgatttcctttgatcttcatgctgttctacaaaagaggtggggcagggacaggcatcatgaattctcaaggaaactgaggcttggggtgtgacacaacttgcccaaggtcacacagccagcaaaacccatcactgggtgtcctgactccctgaccagccttcttcctcttatgttcttcctttaggactcccccctcctccttgagcacaacttggctccccacactgcctgatgcctccctgcccccacccccaggctctgggactccttaggcacctgctggctggtgggacccaggccagacactcagcaggtggctgcctgggggacaaaggagttggcactcagctgctgagctgggagggagggagggaaggagagaggaagggagggaaggagaagctatggggagggaggagggatggggctggaagttgaggggagaagggtccgctttggtgtctttaacaaggagccatgagcaaaaaggggtaaaccagcatgcacatgagcatggggggcgctcagtggtttaggcacttttcacagtaaccccaagttctgtcctcccagactcatgaccagttagagggaggggcttgagggtagagagaagagcctgttgagaggggggatggagagactgagagagatgccaaggttgatgccacagtatcaaggttctggctgggccctggggacccaggggtagggagggatggcatgagaaggagggcattgtgaggagagattctgcagcacatgcgatttggtgctgcagaatccaagcagcgggtctcccccttctttccccaccacaaattcatgatgcctgtcctttttccagctctttaatggaacagcatcaggatcaaaggaaatcagtggggtggtgactgggaagaaaccagaagtcccccctaccccttgagaggagggtcctccaatagccagagctgtccagtggcaggagaggtcctgtacctgctcttcaggggcacacctgacctgccagagataggaagggttgtgatgaagggcacccatcatggattggcccagggaccccagaggcttgctgggtcgtcacagacccagaggcaaactcttttcctacaaatgagaaactgaggccttgagcggtccctggccaggagtctcctgtccttctggaggccagagtagctggatcatataggtgctgtttgtcatttcatctgtatctctttctattaaaatctaactggagagatagtcacaactgagcttattaaaaaggcagctctcctctaaactgagttccttaaggggagggactatgttatattcctcccaatcaaagcacctggtagctgttgaatagagggttgctgaatggagaatggaaggatggatggatggaggatggacaggctaagttctattggtgtttgggaaacagagagagccatctgggctgggtgatcaggaaaagaggggatgggagaaatgaaataagcagaaggacccaggatggccttccaggtatgaaaaaatggctgagcaaaactgtaggggatgagtgacacagggcatgctcagggtctaggattcaccctagcatcctcatggcatctttccactgccccccttcattcagtccctgctcatctcctggcagagccccttgttccagatggacccagccaggacttcccaccctaccccctcccttcctgccagactgcctgccagcaaggctgcaggctctgcagcctgagacctggagacccggattgttgttggagaatcggcaggtttgtggattgttgttggagaagccgcaggtttgtttgctccggagcccgcagagaaatcccaacaatcaatggccaacaacactctgcctgtggctgcagcatccatcctccccccacaggtctggtggtttgggcagcaggtaggcaggtggaaggaagctggggcagggttgggccttcccacctgggggctgggcctcagtggaggctgaaggggagaggtagggaagcccaggatgccaggacaggagtgactggtcctctcattcacaaagccctcaaaggactgaagagtaagagccaccccacatcactctgctctggcccaagacttcagggaccatagttcacctgactcccagccccttattctttcctgacctccaaatattggaaaggatgttttattcctttgccactaatgactgagaagcacctatcatcaccagaaatgtgctagaagaaagtgaagggctgtttatgtcttgggtctgtctgacaacatgggtttcaacttgattaataaaaggcagataataacttctatctcacagagatgataagagaactaaatgagctaatgtatacaaagcacttcgtacagcgcctggcacatagttggtaccatataaatgtttgctattattgttgttgctattatttggatagtgatactctcctgggttcccttctgcctgtagtgaagctctcccctatgccgggaaagtggacatagtgctagctgaagccaggttttgtgaaatgggcagacactttggagtagccttactacttactggctgtacagcctcagggtaagtgacttaatctcatcaaaactcagtttttccatgtgtaaaatgggaacaactaatatcttactgcgagtactaaatagaaaagtcatgtgaaacgcttgaccagtgaaggctgggcccctgaggattctgggccaggcctcacgtctcaatatatatctatggaatgaatgaatgaatgatggatggatgggtagatataccccagggcctgctcttttaggagttgtggacctgaattattgtggttctggatgattcttaggcctccacctctccattaaagggcatgtaggctcagagctgctcccaaagattcatgttggtccctgcaagctatgtgagagtgtctgaagctgggagatggatgagggggctatggagccagatgacatggattcatccttcccttacctcttagtgccagccaagtccattcgaggcatccctctcagccattaggggtagtgggtgggtgcttagggtggctgttatagggggggtggtcaggaatcctgggctttacctctgccaatacccacctgtgcaactctcattaatttattcaacatgtatttaatgtctgccatgtgctaggctttgtgtcactggggacacaagcagtggtggcactaaggggtgactggggagaggctttagcccattcagaatggccatcagcaccctatccctgagccacctcaggctgatggcgtgacagcttaatttgtagaaggaaaaaacgaagtaaaggctgtaatttacagttgggataattggccaactgttaggaaaggaaaaaaattctaacatacaatctatgtaaaaatagcatgcttgctacgcaaactcagcttcaagattcggtcccagctgccataggcccgcctcccctttctaaccaagcagctgaccctaaacttctcccaaacaggaattctagagcttccccaagacatagtgggtgaacaaaacagacttgggatcatctttgttgagtttagttttgctgctggagcatcaagcaaccagggacttgtgacctagcaagatggggacctggatgggggaagccaagggatggtgagagcacagaagagtcctctgacccaggctggaggacaggcctggctcccctgaggaaccatgtagtagatgctccttaaataggtactggagaattacaggaagtgtcagctaagctaatacttgaagcgtgaggtagagtgagccagattggtccgggaggggaaaggaatttcaggcagaaaggctgataagagcccaaaagctgttgagaacttggttcatttgacttggctaatttggaaaactgaagctaaaactcctttggcctggctgggtgggtcggcttcctggaattgccacttcctgttggaattggtcttggagacctcctagtgcctgcttcccaccacccagctgcagaccagtgctggcagcatagtctccgccagaaacctcttctgtatagaacctggctcctcctccctgagaataggccagtaagctggggacccagaaatctgcatgacttgacaagaactttgaggctctcctgtgctataaggcatggcaacttccattgaaggctccagagagtggaggcccagagaggacaggggtatatgtgagatcacatgggagcctgggttcttaaccacctggattgagaagttccttcactaatgtaactcctgcctaataggcccttttctgcaccctctttcttctttttttttttttttggtgggggtaggggtggggttggtagagtgctgagccatgacagctctgcccaggtgggggcacagcattcctgagctgatcccagcccagcagatggggcttaattgggctaggataggtggggacaaggagcacaggaagctggagggcctggaactggatggatggaggggctaaggaagcaggctttctgatatgctccccatatttaggcaggcatggtagtactggtggggaatggaagctcagtttctaattaagcccagcccttgtgtctccttgctctccattagtgccccacagtgtccccaaggcattttaagcggccaccctgctgaggaggccaggatggccgccagggcctgccaagcttagacctatgaggagcaaaaagccaactcaggcttctcctgtccatggcagtctctgggtcctccagcctccttggaagcccggggctggtgggtgggggtgtgctcctgcctgccatgtcaacctctgggtttctgaacagaatctggactgtctcccatggggccttgtccccagtaccacttcctgatcccgaagtgccaggctggggacaaggaacaggacctagtattggtttcagcagcagcccccagactcatggatgtgctgttagaatccagcacctaccaaggagtctgcaggaagcagcaattaccattttaggttaaggcagccctcgtttgttaacccttgcagcactagggctcctggaagctgagtcgtccttcctctcttttctcctccagaccttcccttccagacatcatccctcagttcttggcagagtgagtaacccagactagccatccccaggccccctctatcaccacattctcaagtggagctcagagaggtggagcagcaggtccaaggtcacacagccatggaggcagcctccattcctgagacccaaccttaccccagtctcagcggcttccaccttcataatctccctaggccacattcacacatgcagagtttaattaactttattgatattcagaaattaggagaatgactaaaggtaattgctcattaaaaatcattaaactgacacagcaggctcggcacacgcagccccttcaacaccgctttttcctccactgtggctggatggcccaggcaccccacacagcttgggaagataccccgtggcccaagacgcccctgatgcctgacgccaatcaagacttggaggctgcagaagggaataggggactgagcctgtgagcttgggccaagcccagcacgattttgccctacctccgcagcctcggcataccaggccttccaaggcatctgggccgtgcctggctacatcctgcagtctgcatcctgcctatgagcaaagctctgagggcctcatcagagaggtggcggggctgaaaggctgagggatgcacccctcgggccgaaaaggctcatagcctgaggtctttgctcctttaggctcgccttcacaaagctaaagtgcccaggaaccccgggatggccaaatgcgctgctccccactgagatgactcactatcccaatggttgggacctccagtccagccgaggagagaggagcctctggctacccagctctgacatcccagccctctcatcctcaggcttggcacttcggggctgcctcttcgtctcccttggggagtgaaaatagaggtctttcccaacagccagactcctaccccacatatcccactggcaggtgcctccatgggcactggagatcctgatagtcaggaagggacactgcccagggacacacagacttgaggccacagagtgagcagattcctcctaacactcacacccacatccccatcagggctggtgggactcctggccacaccagccttcctcctggattcccacagtctcactctagccctgcagggagctctctggctgaggctgcacccacacactagtggcctcacacagtcctcacacccattcactgctgacccctcacccaagattcggaccacttgaagtgcagacacactgggactggctcctctagtcatgcagggccctgattactctcacattcagacccacaaactcacacacaaggccttgactaactgccaggggacagacacaggccctgcgccccaggggagctgtccagcgccaggacccatcaggacccaagataggttcggaattcctagggacatccccaggcagctaggcagggattcacacttctccttcccggtcttcatccctggggtgggtcttgcaggactcttcccctctccccagaacgtgagcacacggtttcaagttctgggcgctgccggaggatccagcatgggcagcccggtagcggggtgaggacactgggctgtgtgcaagtggagctagaggctcagaaaaaggcttctgcgtctccggggccacagtttttcttcctggatgaagaaaactgccgtccgggggcccagcctgtccctggccgcgctgccttgacctcggcagcggcctggaaagatcgagcagggaggttagaaactcccaccctcacacttcacatcaggcccttcaaaccatatggcaagggatggcaggtctcaactccaagtgcggttctgccgaccctaccagcctactgcagcgggagaaggacgtgggtgccagtagcttccatgagagcttgtttgagccaggacggcaggtccagacaagactcttccccgaggcacggaacccctatcctctccccaacactcccttgccgctcacaccatggccaagcttccctctacccaagaccgacgaagttggggaccagactcctagagggggcgcggggattctcagggtgtggggaacaggtcctccagagacaaatctgccttgcaggtggggagtggaccagggccgggcaggaaggcaggccgggagggaggcagagctcggggcagtggtgtgtgtgtgtgtgtgtgtgtgtgtgtgtgtgtgtgtacaaggaaaggactttggggaggacagagtctctatcccaggatctccgctgctgcagccgagggcagagccaggagccagatagggggtccaggcccttggagtttctctctagaattgtgctctaggtcccgactctggcgtggcagcgccagggcatggggaggtgagcgaggtcccaaccccgggtccggccgccatccggccccgtctcccctcagtaagaacactagaggccctggaaccggcggcaaagtcgagcgaagtttggcgggcggcaggggaagcgggaccacgggccgccagctggaccgtcccgactcactgccttgcgccccccggcacgcgccccagcaccctgagatgcctagagtgtggcgaggtagcgcgcgggtgagcgcgtgtgtgcggggagtgggtggcgtgatgaattgcatcagagaaatcccattagatctggggagatgattaaagacgaggtctcggccgggcgcgaatggcgggagccgcggcagcttcccgcccgcgaagcccgcgccccgcccggcttggccggcgccgggggcagcgcagccggcggggcgcggtgcttggactgggcagccagatgcccgaagctgggcaccgggtctcccttcccacccctggggccccgctcccgcccccgtcctgccgccggatgccggggtcccttaccgtgagccaggagcgccagcagcgagggcaggagcagcagggctaccgggcgcatggtgctggttgcggccgcgccctgggctgggaccgcggcgggagggcggggggcttggtggggcttgggcgcgggggcagagccgggtccggccgggtagagggagcggggccgcagccgtcaccgccgctgccgccgccagcgcctgacagaatcagcaccacggccagcgcctggcgacggcgccggggatcgccgagcggggctgggggcgggggcgcgggaggagcggcttaccgtaaagtctcatgcaaaggcgcagagacccaggggcaggagcccaggctcccgctccaccgcgactgccctactcatgtgggcacacggcccctgcccttctgcgctgcccacccccagccaagcatgccaccctctttcccgttaacggcctgctaaggaacctcaattaatagctcactgtagccttctgattctccatgagaaagagcaacactttccccacccctctccacccaatcctggtacctgagggcgtcaagggtgacctgggaagacatccgagagtgaggcagctggtgaggcccgcgtgcccttgtggcagttccgtcttgggacgataatgaagatggcttttgagcgtacaaaggataataaattattactttgcgctcaataaatgccagggctccaggcagctgcatcagcagcaaactgtgctcacagaaaagcttaattatcctgatattatagttaaaagccagtggcactcgcatcctggggagacattcttcacttggcaggaggcaacctgggccaagctgtgggcagctgaaggtagtatcctgggtccccacgtagccctgggtctccaggactctgccttggcccctctgcaggaccagagaagccacagtgacagtcgatacagacccttcatgccatctctgcccaggtttctggaattggtggagaaaatggcataggcatgagagagggtttcctagagctgttattttattttattttattattgtttttagagacagggtctctgttgcttaggctggaaatgcagtggcacaattatattaatagctcacccaaactcctgggctcaagagatcctcccacttcagcctctcaagtagctagaactacaggcatgcacccccaagcctggctaatttttaaattttttgcagagataaggtctcattatgttgcccaaactggtcttgaaatcctggcctcaagagatcctcccgccttggcctcccaaagtgctgggattacaggcatgagccactgtgccctacggctgttttagatagagacttgaaggaggcccaggggtgtagcctgtactattaaaggcatggaaaaataactttccagggccctgcttgggctgaggagccccagtgagtcacaggacagcaagggggcagtcacagctgtgccatcctgaggctgctctttaaaggcaggggctcatggatgggctcacttgaagagctttaatgggtacaatgggacaggatcctatggctgatgttattattccctgtagaggaataggagggctgaactccctattgcccctgggagaagggcagttttttgtttagtttctttttacatgaacttggttgctctccaaagcttccagactccagtcattgtccagtgtccttcctgaccctcatcctggaagcaggtggtgaaatttctgctcaagttccttagagagtgttttggtcctcttgaccagagtctcccaactctgctggttggattctctccagaccctcttcttgtgggctctggggagctgtgatgactgctgtaaagagtcccaggcagcaggcagatggcgtgtggaattaggaagacgctgggatttctggacagttgttttgagaagctgaggaaaaagagggcagcagcagaaggatggcaggaagaaggaggagctgatgcaagaatcaggggtgaggagaggaagccaggaaagaaggtgcaagaggggaggcagaaagagagttgccaacagaggaagggaagagacacagaggtagaaggttgtgtgaccgggggaagtttaggaaaatgctggcaaatgtcatgagattcctcttttcctccttgaaagtattcctgggctcctctagtattcctggtccctcatggctaggcagcttgggcaaggggagtgagtcatgacctagggatgaatcttgtattgccaggatgattcatggggatttggaggttggtggcaggcttgtctgactctcttagcaacagggctccttgatgggctgggcactatgcacataaaggagggggagagaagccatcctggaacttgtcacatcaccttccctatggcctgaactaacctagagggtccaatggagactacaagtcccagaatacagtactgtaccctgagctcagaagatgggcttgtactgcatgatgggcatgacaatgcaccggggctgtccctccctcctaaaggcagttaacatagcctttatgcagtgggttcctaggcaggttgaggcagagcctgggccaaactgggaaacagcagagcttctgtcaggtgccctctatcatgccctccaaggggctcgtcctaaccagaccttgatattacctacaaattgagaacaataaaatgcccaaggggacaatcagctgtatacagggctggcaggcttatagtctactcaattcataggcacctttgaaagtggcagtctgggtggacttgcaaggctcccctcactgctctcacttctgttctctgcatcccccacctggctttttgctcccagagaaccctgggcttcccctgtctgtgtaattgcttgcttaattgtctgtctgctctactagttgttgactttgcgaaggcacagaccgtgtctgtctcatctacccacaatctagctcagtggctggcacatagtagatgttcaataaatatttgtgaataaacaacagggatgaggagtgtctaaagcccaaggccggtcattggtgtcaaatgagtgctgtgagataatgaagaaaagggcaattgtttcttttggggatgaggcaaggtcagtgaaatcttcacacaatggatgggtgaaaccaagttgaatatgtttttaaaaattaattaattaatttttgagacaggttcttactctgtcacccaggctgggatgcagtggtgtgatcagggctcactgcagccttgacttcctgggctgaagtgattctcccatctcagcctcctgaataactgggaccacaggcatgagccagcatgcccagctaattttttacttttttgtagagatgaggtctctgtatgtagtccaggctggtctcaaattcctgggctcaagtgatcctcccaccttggcctcccaaaggactgagattacaggcatgaaccactgcccctagcccaaataagtcttatgattcaatggagagggagagggaagacattcaaagttggggggtgtagtttatgcacagcgttggaaaatgcaagctagtctgggtcagtgagaagactggttctgctggagcagagtccctgctgggaagtaggagaaagggctagagtaggctggggcctagctgtgaatggcttggtggtcacctgagctgaaggacatccttggtggctatactgaagggattaccccatcacgaagatatttgcactgaaacagagcaatctggcatcattaaggtatgttttcaagcactgtggcaagtggtaggaactgtggggttcactgctgactccgaagccagggggtggggtgtgtgtctgagctacagtgactgaattaggtttgagagaccagagagagggaagaaggggctcttcaatcccagacaccccaacccctgcccagacaaagccagacatacatagagcccccatccatccattgaagctggagaagccagctttacttccccagttccaaacagcccatcaatctgtaggatcacaggcacattggtgacttattttgaagtctctgctgagatgacacttgctttctgcacgagaggaggagaaaattactctcttctaagacagctttcaaaccagagctatatcttttgtggagccaaaggggttttggtgtttcagggaggcaagggcaggggctgccacctcactccagaggctcccaggggttcagagctgcctgcttacctcaacccacttcatggagcaggattccagaccttgcagctcctggaacagtcagggatgccagtgctccagccagggctccctgcattacccaaagtcaacccattgaatttaggggcaggaggagggccctgctctgataaatggagagtcctggctccaggcatttgctcttgctccaggattgactgcaggaagagctcagggtagatggagacagcagcagaaagtggtttgatgtgagctactttccatctccaaacagaggcctccagcctgcccaccacccccagccgaggcctttgatcctccacagctccataaatgtttaatgccaccggctgggcaggaatgaggcaggtgctgaaacagggagactggggataggacttaagacgtacaatgttggctagattattttcacataggagctctgggatggatgggaggaggctttcccccatcatgtggcaggagaagtcccagggttcaaatttggggcactaataaagaaaactctttgaaaactaccaaggggatgaaaataaatgaataatcaattgcaaaagcccaatctctggtttgattgaaggagaaagatggaaagttaaatgacaatcaaatgcaaatacagctcaacaaacaccacagcaattaccaggcgcaggaaccacatggtgcttgcaggcagcgggggttggcaatttggaagcctgagcctgtgcagaggtgacgggcgaggggccattttaatggacggttaaatagatgcaaaaaaaccctgcatctactttgcatacactgctgatgagtggggtgctggaattctggcatccagagggaggttgttctaccttccgtggctgcctctgtatcatttcaggaggccctgagtacctgcggtggggtgaggccagagtgagctccagctcagatgatcagggagaaggctgcaccagtctcattggattcttcacaccagctggtgctgaaggttcaggggttgaagttgaaagaagcctgtggggtcctccataaaggactcaaggtgctggccttccaacagcctggtaagagtggctttctcctctagatttgcataatgctttgcatctcatttgaatactattaatttggtgtcaggctaggttggcatggtgtaggaaagagaacagctggccttctccatcccctctgtaccacagagcttattctaagcatagccttctgcaactggggggcatgaggcctccactttcaccatccccttcatgttccctgacacttagtctcttagtgaagccagctcctaaaagccaaggctgcctggcattgtggccacctgcagggttatgctgaaggaagaagaaagggtcccccaaggtcactctcaccagacccagagacaccatgggaggatgctgggggcctttgtcatcccaagcaatcaaggcagcttggcttggaaagggtccaaagataataaccaagagagggagggaacaaagacaggcgataatcccagagaaatatagagggctctagaaataaaatcctctgaactcaatatttctagtgcttgaacttacataaaatacatctgtccagaggcattgggtttatggtgctgctctggggctgggaacctggtaccaggttgatggccatgtgatgagagagtgagtcaccaggtggggtgagttcctgagaaagagggaagaggccccgggtgcatcctgtgggctgcccctggcaggtgggcatcgggaggctacagggagatgcggatgagttatttaattgaagaggaagagaagtgcattccatgcagagggaacagcatgtacatcggtaggcaggactaagagatggttagtgtagctggatggcagcaaacaagagttgtggtgtgggatgtagctggagagctggggtgtagcaaagcttagtggctggtatgaaatctctaggagtcctacctgcccatccatctgtccatttattcgttcgtccttcaccctactacctcccaattcattcatcacccactcattcatttactgaatgagtgagcacttattgagcactgtgtgtatgccaggacctgaactagctactggagagggagagccctcaaggagcacccagactggggaggggaaacagccccaacaccctgtaagacagcatgtttatctccacaaggtacttaaacaaggctctggaagccctagaggccaagtctcccatgcttcaagcttcccaaggcaagggtccttcattacctccggggagatcttccattcacacagatcctcctggcatctaatactattccttcctgctacaaaagcagcccgcttcttatagccccagagtggcagggagtgtttctgatgttccttctcattgaccctttatttgggccttagagacatcacagtctcaggagaacccaggggaagtgatatgagaacatggtcaagtctcccttagacatcagaacccaggcttagatacacttctagccacttccttttctgggcatgaaaataggacagaaattcccaatgtcccttaattcagcatattccctcccccactcctccttgaactacttgtcctctatttgtgacatcacaatggtctctatggcaactgattgtgaggtcaccagtccttaaagcaacagaatatgtgggtccagacaatggcctgcaagagaaaggaagaatacaaaatggaagcctgggatagagatcatctcctaggaaagggggaggccacccaaggcctgtcagggggagggctccacttctcagcccatctgcagtaggtccacattcggggtaggcaagagcaaggcctgctggaaagggaaactgctcatcaagaaactgagggaggctgggcacggtggttcatgcctgtaatcccagcactctggaagtccaaggtgggtggatcacctgaggtcaggagttcgagaccagcctggccaacatggcaaaaccctgtctctactaaaaatacaaaaattagccgggtgtggtagtgcacgcctatagtctcagctactcaggaggctgaggcaggataatcgcttgaacctgagaggcggaggttgtggtgagccaagatcgtgccactgtactccagcctgggtgaaagagcaagactctctcaaaaaaaaaaaaaaaaaaaaggagaagtggaggattgagggtcatcctgagcattggctggacctcagaggcaggcctgagttcaaatcatcccaacctaatgtttgccttgggcaagttttggaacctccatttctttacctatgaaaggaaaatgatgccacttgcctttcagaaaagtattcagtgagataacctgttggagagcctggcacatagtaggtgcttgtttctatctacttgtacttgtttctatttctttttctaccccctcagcccttatgcctaggatcttgcatattatatgtgccttattaatgcttgcaattgtaagtgcactgtaagtgcaggatgagggctacagggcaatgtttagagcaggggaagtcaatggacctggattcaaatcctcgctctgctatttgctagctgtaagcctttgagcaaatcacctttctgtttcttggtttccttaactgtgaaatgggagatagcaatactgttgtcttcatagggttgattaggactaaatgagaccctgcaaataaatagcagagcttggcacatgaggtgcatggtacttaaacttgagtgaggctgtttctgcatgcgctgcacagtttgtgttcactgtcagttttcaggaaatgtgaattaatctgtggggtgtccagaaccggagagtgggtgaacctcaagacagggccataggatggcagtctctccccgaaaggggtgaccgctcactttctggattccctctagtgcggacacccagctcataccagtcacaggggctgggtgctccttgaagtcagagtgaactcatctatgaagcccagaccagggcctgacacatggcacaggctcagcaacagttaaggtaaactgagttagaggatatcttaataatatactggctaacatatattctgtgcatattctgtgccaggctctggtctaagcactttacattttgatcctcacaacaacctatgagctagatattatccatttttaaaatgtgggaacagagaggctaagtaatttgcccaaagtcacacaactagtaagcaatgacgaagctcggatttgaacccaggctacctggctctagaacctatgttcttaactaccacgttacccgcagccccatgggctgggtccatccattttactatatctgccaccacgaatttcctcccccagctctctcacttgcccctctcttctcccagctgagcccaggcccagtgcaactcaaagaatggaaattctcttccactagcctcagcaatctgcctccccctttgttgaaataaagccactgccacagccaaagccaccaccggatctcttgcttatttcaagtcctcctaaagcttgttgagttcttaacttattaaagataagcacatggaaatagggagcaaatctctttatttatgacataatctccagcccagaaaagcggcaggaacagtgttgcctatattagggaaccaataggaaaaaaatcaattagatccgccagaccgtttcgctattaactttcttctgatgtttctcttaaggctggccatgggggtctccaccagcagctgaggtggagagagaggagagctttgtaggaacagagaaaggaatgtcacaaggaaggcagctgaccaggcttccagacagacaggggaatcttttcatcatggtctccttcactgctttccaaatctcatttaacctccatgtttcttgctgcaatttcagttggtgtctttaggggcaggggagtcaattggtcactgttggcttcttgcagacttgaaccccaagtctgaccacatttttgcaagacccatcgggagaaggatcctcccctttctgaaagaacaatattctggaggggctcttcttgactgatgtttagtaggctcttctgctggataattatgcctcaaacaaccccaagcagctaccgcatgaggtcttcacatccatctgcctgcctccaggagcactttctaagctatctcccagagatagggctcacccttattcctgagagcctccggtgaggagggtgccctagctcccatagtaaccccagaattagtctccttaaaggctggggatcatggcttgttcaatagtttttcttcaggttcgggcatatagaaggggctcaataaatagtcacagaatcaataactattacaaaagccccattgatggaatgctcgctccgtaccaaggctgagaagggtgatctgtcacccaaagtaggacccctttgttgctccctgaaccaacaacccagaagagcctgccagttttgtagttttgtttttccttttcttgctatttggccaggagcagcagtagcagcagctccaagaagtaagtattattattattattattattattattattatttgagacaggatctcactctgttatccaggctggagtatagtggcacaatcatggctcactgtagcctcaacctccccatgctcaggtgatcctcccatctcagcctcccaagtagctgggactataggcatgcaccaccacacccagctgatatttgtatttttttgttgttgttgagatggagtctcgctcttttgcccaggccggactgcagtggcgctgtctcggctcactgcaagctctgcctcccgggttcatgccattctcctgcctcagcctcctgagtagctgggactacaggcgcccgccaccgcaccctgctaattttttgtatttttagtagagatggggtttcaccatgttagccaagatggtctcgatctcctgacctcgtgattcgcccgcctcggcctcccaaagtgctgggattataggtgtgagccaccgcgcccggcctatatttgtattttttgtagagatggggtttcaccatgttggccaggcagaggaggaagctgagtcaaggaggagcagtaacttgtccaggctaataagtgaattagatattctatgtccatccactgttggtcattaggaagttcttcttaaggtctaacctaaaccttttctgtttcagcagcactggctccttcttagtcccatggaagcacagatcaacatcattgcccttgcaaacttctctcagcttaggagagtctactcgctctttgcacattgttgacatgaaatgaatattaaacaccaaacctcatagaggccagccctgctgggcgagcaatgaaccaaccctcctcatgcctgttcattattataattaacattgagccgaggttggtggtgacctcgccctcgccaggtatttgggctgttttagcagcttattcagatcagtgacagacagctctgaatagataaactccccgccatccagacgaatcaattgcaacactgccgtcacaacaagcccaataaatcaatctgatttcaggcgacatggtaactcagtgctgggcaagctggttttaatttccgcgtggctgagacccagcttcctctactcactggagcacccctctttcccagctgatgctctgtgcacacaggtgcccagggccctcagaggactcaggccaagggggcagctacagggaggacagggtaaccaggaagctatgttactttgaggaagactcttgaacccccagacccagaagcagctgactcagatccactgctgggatccttgttttgctggcttcagcttcgattttccgctgccctttgcaaaaaaccaagcctggaggcctctctgggctgcctcccaaatcaggaagctgcagaggtaggctgcctatctcaggcaccaggacaactgcctttttggtctgggagattgagtttgtctggcagggcaacaaaaaactcatcaggacagatgtagtcatgtattgggtgcctacttaatgcccaggcaccatgctaagcagtttatacacgtcatcttcttaacctttgtaacagcccaaagagatcagtggcaatgatccacattttgcagggaaggaaaacaaagctcaaagaggttaagtaacttgtcctgagtcacacagcttgtaagtggtagagcgtggatttgaactcatgtgtattagacttctgtgcctaagcttcagccaccacagtctcctaaagatgacatcagaggtgcccatactctccccctggctagatattacctggttaagtaattcctactttagagaggaggaagcagattctgagaggagaagccagtgcatttcctctaggctcccagggaaggggagcctttctcatgaattcttacaatcagcaattgttccttgaattttcatctcaatgcttcaggtactgagtagaggatgttgaggaaagagagggtcaagaggctgagctggcctccttcccacaccccagctctgtcccaccccacttgcaccccatcacattaatagatctagatggtgaggtgaggggctgggacaggcagcagtgtgttaggagatgtggctttgaagtcagcagatctgggtccaaattctagcccaactacaacttatttgttgaatacacctgggcaagtctattaaccccttggaacttccctcatcctgtccataccgtggggataatattactcaaaccacaggttgtgcggattaagagggaaaattgcatgggaagtgcctggcataaagtgggtccttagtaggcattgggttctttccccctcttgtccctgctctttctgaaaccccatgccttaggtgcccagttctgaatggccgaggtcagggcatttcaaatatgttttagccaagaaactcttttgtttttttgagatggagtctcgctctgttgcccaagttggagtgtagtggcgtgatctcactgcaacctccacctcccaaagtcaagcgattctcctgccttagcctcccgagtagctgggactacaggcgtgtgccaccacgcccggctcatttttgtatttttagtagagatggagtttcactatgctggccaggctggtcttgaactcctgaccttgtgatctgcctgcctcagcctcccaaagtgctgggattacaggcgtgagctaccgcgcctggccagctaagaaactctttaatcaaaagacactttatgaagatggcaaggatacaaaatagataaagggggagttggtcagatggtgatagggggctgggagttctcctggcttgaacccctctctcaccctcagccccaaagcagccgctcaagtgctttcctcaagccctgggccagcacataaagggctgcctcactcttaggtgtcttaggtcacgggcttctcaggagctcagaagtgatcacctctggtgatttctggctccaacactatctctgagccaccagctaccttgaacctgttctggattcagggcatgacaatttaggtgccaaatgggcaaagctgcgtctggccatagggaggctgtatctggctgctccgggtgggaggtggggttgggcgtcgcagctgggagagccatagatctgggaaggggtgggcagatgacccaggattgtgcagggggtctctgtccatcttgggcagcaatggacctgtgggcttccatgggaagtagatgcctgttcaccaggtccagcacttaatatcctcccgagggaggcagggaccacaggaagtggaagcgcagtggggagagtgacatacaacaccatacagtgagcaagtgacagaagtgaattcaaacctaggcctgtgggctccagagggctgggactgccgttcattctctcctgtccatacagtggctgtcctctacccccagctctctgcagagaattatctatcagccctttcacccaccaaacacagaacatgaagagagaaacttaaattgtagcaggagggaatgggattagctactgggaaggacttcctgactcattagcttgtctctagaataggttattagagaggcagtgtgctctctctctttggagggatttcacatggggcttcagtgcagctgggcccctgtggcttccacttcctgaaagctactgagagacaagctgacccctgatgtgtatggctttgtttttcgtaacgtttattttttgaataggtaatacctgtacatggttcaaataataagggtataaaaggttgttcactgaactctccctccagcccccgtctccagcttcccctccccagaggcaagcaatgttacctgcttcctgtctagacctataagagcaaacacggacacatactctttcttgagtcctgcttttaatacacaagatgtagcatcccctgcaagctcttctgtgcctcgcttttgtcacctgacaatatatcttggagattactccgaatcagtacataaagagctgcctcactcttaggtgtctttttatggtcacggacttctcaggagctcagaaataatcacatctggtttgattagcttcacatttccatttacaacgtccctgcccagagaggcaagaaacctctccaaggtcacgcagcaaggactagggacgcgcagagtttctccccctcctcccgcctcagttcccagctcctgtcccccgccacctcgaggctgagcgccgcccaggtgaccagaagggagagggggaggtctctaattgaaatgccctccgcgctgcccatttgcgatcggcacctggaggggcgcgccgtgcacaatgagggcggggccgtggggctccgggtgcgggcggcggccgagtgcccacgtgggtgcaggctaggccgggctgatttccctggaaccccgcgccgcgtgcttccctgtaatgagctcccagggcccgaggtgagcttcctcggctgctcacacggcagccgcgtggcagcaaagaacacggggacttttttcttccgtgcctgacagctcattagaagaattaatttactctagcgtttgcagtttaaaggacattatttactggttaattgttgttattacaaaatgttaaatatcattatttatttcccaggccctgacagcttttctgacaggaatttattaggtgagactgtatcaccggtaggcacccctgtgcagggtagcctaagagtgggcagtttgcccctaggcctagctctctaggcagggcgggcactcctaggggcagaacaggaggggctgaaccctggcccaccccaggacaaaggatcattgtctcctcctcaccccccatttctgccccctgatgtgcgtgtgttggtggggcaggggggtgggggctggcagacggggggcatgccttgcataaagctgcagtttaggggtcaggctggcagttaccggaggcccagcggccagaatgaggtccagactttgagtccttccctttaaacagttacttacaagaatgttctcctctcctgaacgcacagaattgaagagctggaaggaagccaggtggtccgctggtgctgagactgcaaaccagtggcctccaggtggtaaatggcctatggacttgagtttgacctattcaagagacttcacataaaaatccactttgctggcttcccttgaaagatcagacaatcttgccacaagacttgacccacagtcttgcatcaattggcgatgatcagcgggcaagaagggcagcgctgtgcaaggagcatgcctgctctccaacaaagggagggtgccaccttccccctttgttgccttgtctacattattttcctggcctctgtgggcatttgagttttcaaccccgatctgctctactaatgaccatatatagatgaagacactgagcccagagaggttaagtctctgatggccaggacgacagccccactctacttttcttttcctttttttttttcttcttcttcttctttttgttttttttttaggatggagcaatcctttatttttatacactttgacaaggaggttttccataaacaatctttccagtgaggaacagagaacaggaaattcagcctccagacatcagcagctgctctgctcagggctgaggctcctccttgccaatgtggtgaggtggaggggtgtacttcccttcctttatcagcttatcctgctgcttcctgatggtacctgcacgtctcatcgttttctgccgaagcaaacactctacgaaatcatcagattctatcttgcactctttctctgcccggataacactgattccatatgcacattctatccattctttttcaaaagcatggcatcgagcagcaatcttgtagggctgttcagcactctggattgtccaccattgatctatgttaaggccgaatcttttctggatggccaagaaaggcatggtgatccgatgctcatgtctttgtgtcttctctggccgccgcttcaggatgacccctagtctacttttcaccacactgtgctgctccctgaatttctctgctcccacctcctctgggtccagtttagagtgaattcagaccgggaacgcaggtcttcagcagcttcaggggcaggaacaagaggcagcctagtgagaatttacaaggatcatggccttataaatagcatccacttattcattcagcaaacagtttctggggatctactacgtgatgtattaaaatgattaggacccaaattgtgttgttgaggaattagtctggggacactgttcatgaaacaagttgcacaatgacaatacaaggagatgtccgagtagtagaggcataggaagatgggattggtggggctggagagaattcatccttcatgcagcgttttctaggctggatggatggcctgcatcctcaaacacagacgcacatgtcttatttaattctcacaacacagcggattgaaaatatctgtcatcagcttataaataacggctataccaggtctcggacttgctgtctagattcttcccccagggtgggtgcttgcaagcaactccagccctggggaccttctgttctagcaggtggcacccttgccatacagtctgttgactggcaaccacatctcataatcaggctgattaccctcattttacaagtgaggaacctgagactcagagacaggtgacagaagctgggtgttgacgggtgaaatgggccctgggaaggagagagagttgttgtctgagaccaacacccagccccgggaaatgtgggtcttgctggcagacttcaaacagtggccctttagacaaggtcttgggtcccatcctttcctccccaggaacctgacagcagtgggtagcctcaaggaaaatgtggagaaccaaagggagatgaaaagttcttcaaaaaagtatgaaaacaggttcaactgagccattactgttgctatgctgtatattattataaagttattcctgcctggcagcctggtttatgttagaccctacctcatttcttctaggttataggccctaattccttgtctggtgagaaagaaagagaccagcactattggagtgaatcctgagctgattcagaaactgtacagcttgaggaatttcacagattctcagtcagggcttgctgtcctttggaggtcttcaccacccccctcatttcattttattgccatattaaatttttaaaaatttaattcatttttggaataggtgatacgtgcccaaagtgcaaaattcaaaaggcataaaagagtatatggtgaacaggctttcccactgctcagaggcagccagtgccagcaattgcttctgtttcactgtttgcaaaaatagcattgtttctcttttccgttcacatagaaaatacagtaattcctgcagaagaaagtaaaaaatcatatgcaatccactatttggagttgaacattgaacattgttcacatttttggtgttcacatttcagccagccttttctctttgcaaagatacatgcatctatagtcataaacttgcataacctggttttattacttgtttacattaaatgtgattcttcaaaaatacagatcggagaggatacaaactaaactgataacaatgagtaccttggggaagaataatgagattgggtaaggattgaagggaaattttttagaatgaaaatatattgatacagtacttcctcctgttattcctctggaatctgattttaaatgactagatcagaaggctactatttaatcaatcctttattattgtggttttaggatgtttgcaagtcttcctattatagacaaacctgagatggacatttttgtatctttttgtaggttggagcaaaagtaattgctgttcttgccattgaaagtaatggcaaacccaatatatctttgcacacttatctagtatttccttgggggtgctttaagaaatggaactgctgggtcaaaggtggtatatactttatggctttttgatccatcacgtcaaatttccttccctctgggctgtcccaatctcctgttccacgggcagagcctgccccctactcccacatcagatttattcaacacagcacacgtgtaaggtctgtgagacagtgaggcaaactcatgggaggctggggaagcttcttcttggggtgaagaaccctaggatgctggcagcagcccagagggacctcagtggccaaagggaaaaggaggaggagcaatgaatgggtgtagaatccccaggcaggtggggcaggggcctccaccagtccaaatcacaaggccaaaagttgtacagcaacaacccaaggctggacttggatcctcaccagggacctaagcgccaccttctgcagtggcaccgcagagctaaaggcacagctgagatggttcctcttggagttcttctagcccatgagagttacatggcctcaagagcatgcagacatggaggaccttctaggactggctccaactcctgccttctctaagtgtctcagatttgattccatgtctcctctttgcttccaggtgcttgtcactgcctaatacttgtggttgtcacccacagcctttgtactcttagattctctggcaaattgacccatttcatttggaaagcttcagaagaaactgggcagacacaagacggacttgttgatttaattgaaaagatggtattctgaaagcaccccctcccctctggagcctggcatcttcacagtagctgaggtttcctcttgatggggcgaaaagagaaagcccaagattgcatctcattggtgagatgaataatacatttgaagcatctcacaaactgtgtttgatccgcctaaagcttcaaccgttaacgtatttctctttatccccagcaagggagggctgggaactgtcaacgttttcctttctgcctaatttgtgccttctccatgaagagaaaagcagggcctgggggagggaaggaggcaaggaaagagaagggtgacacacacctcctggaacaatgcagtgagccacaggactagggggtgttcctggggcttgggaacactggggggtcatcaggacacagcaaggggtggttggctctggggagaggggctgtgctatgtgtgctgggacctgtttgcaggactgtgtgcccctaagaagtcagtcccttggagggtccatctcctgtgtttctggtgggaaatcagaggtgggaaattgagccttgagccttgccagttgccaagcaccaaagatgcttccttcatctcatgggaagcagagagtaacagtgttaaaaactggccccctggccgggtgcggtggctcatgcctgtaatcccagcactttgggaggctgagaggtgcggatcacgaggtcaggagatcgagaccatcctggctaacacggtgaaaccccatctctactaaacaaaatacaaaaaattagccaggcgtggtggcaggcgcctgtagtcccagctacttgggaggctgaggcaggagaatggcgtgaacccaagaagtggagcttgcagtgagccgagatcatgccactgcactctagcctgggcaacagagggagactccatctcaaaaaaaacaaaaaaaaaacttcccctgactgagctcagggacagcactgtgcctgtgtttttaccaacatgcttccagtcactcttcgtgtctctctgcaggccgaccttagtgctaaggatcctatccaaggtcagaccgagggtaagagtcaggctaccgggtccagaagttcacgttcttaagtgcagtgccattctccccctccctgagtcttcatgactttgcctacctaggctcctattctggaggagggtggttacgagcacagactctggaggaaggcggctgtgttctgaatcctctcaccaagcctcactttcctcgtgtgtaaaatggaggtgttaacaatagtaccgactccataggattgtggtgagattaaataagtaaatatactccggttctcagagcaattcctggagcataggatgcactgtgtgtattagctcatttgtatttttcccacttcaatgagctggtctacgtgtgtatgagctcttattcccagcctatttctattccacagtctggtagcagccacccctcccagctggccttgaacctatttcatctcccctcttgggacgaccatctctgttccagtccaccttatttcctagccctcttcctcccctgcccagcctggcttggggcgccaccatcagaccccgccacataaccctcattcgtggaagcttccctgagaccccccagagtaccgttgatgcatatcagattccaccaggtcttttgcctgagttcttcttttttctaaattaaaaaaaaaaagtattggttggtttgtttgctttttaagagatggggtcttgctgcattgcttaggctagatttgaactcctgggatcaagtgatcttcccacctcagcccctgagaagttgggactatatgcatgtgccactgtgcccagattaaaattttatttttaattgacaaataataattgtatatatatttatggggtacattgtgatacttttattttatttttattttagagacagggtcccactgtcacccaggctggagtgcagtggtgcgattatagttcccagcagtctcgaactcctagcagtcctcccgccttagcctcctgagtagctgggaccacaggcatgccgcaccgtgcctggctaattttattttgttttattttttgtagagatgggggtcttgctttgttgctcagactggtctcaaactcctggcctcaagcggtcctctcttctcagcctcccaaagttttggggttacagacatgagccactgtgcccggcctgatgtttcaatatatgtttacaatgtggaatgattaagtcaggctaattaacaaatccatcacatgatctcacttatatgtgaaatccaaaaaagttaaagtcatggaagtagagagtggaataatggtggctgggcgcggtggctcatgcctgtaatcccagcactctgggaggctgaggcgggcggatcacctgaggtcaggagtttgagaccagcctgaccaacatggagaagccccatctctactaaaaaatacaaaaaattagccgggcatggtggtaggcgcctgtaatcccagctacttgggaggcggagacaggagaatcacttgaacccaagaggctgacgttgcagtgagccaagattgcaccgctgtactccagcctgggtgacaagagcgaaactcaaaaaaaaaaaatgatggtcaccacaggctcagggagggggttggagagagaggaactgttgatcaaagggtacagagtgtgtggtttctagtaggtcctctcattcccatggacttcactgatttgggtggctcttttatctcctgtaatggccagtacaggaaacgcccattccctcagtaaccagcagcacactttcgcatgtgggagagcaccaagagagatgacatctctgggagggaaacagagtggatagtccccactggggaaggaacaagggaccgaggagtgagagggatgttcctaataactagcagtgcgtctccatcctaagtcactcattcctatacttcagtttcccagcctccttcctctgctgactccctgtggggaagctgctcattgtgtccaccctcagtcccccaagttgcagctgtgaactgggacttatgcgcagcagccaagagacacctcagaattcccaagtttggaacaggaggaaggagtctgccaaagcaagcggtgaaactagattttggagaggacttcaagtgtggatggtgagagggtggtcctggggaagggagacctctctcttcagggcaaggcaggcctggggtccctgcagcctggcctgcatgcctgcccagtgccccagagcccttctgttcaggcctggcatcccacagaggtggcattctgctcaggagcttagagcacagacgaagaggcaggcattgccaggaattgatttgcggaagcagcgggggctttctcttcctccttacttccttggtctttgatctcctgtcctccctccatagtccattttccccctccttcccttgatttattcctctttttctttctttagctgaatcatagccactccctagaaggcaaaggctgggagaggcagttctttgtcctctttttcccttaactaggtgggtcctcgctgtccagatctcagcctcctacccaagtcatgaggcaggatttggccatggatggggaaaggagacacacacacacacacacacacacacacacacacacacacatatccaaggcaagagctgaaacaggcagaaaaatcaaggaaaaggggagaggcaaagagagaaagcgttcagccatcagaaagacagtaaaagacaagagttgagaagagtcagagacaacgaaaaaagagaattcagcaaattaaaaattttacaaccatccagcaagtctgcaaaaatgatcttccctgcggtctttcatttatctcattatctgactcctaatgtgctttttcccccctttcttttctcgccacacttggtgcaaaatcttattagatttttttttttttttctggcaggggcttcatatagtctttttcattacatttcctaataaaagcaatcactaggacggcatggctggaggattaaaaagccacctcagcagcctcctggccagcagaaccatgactcgccagagccttgttcacactgccaggggagtgggccagccccagcgggtcccgggtcagggaaacccaggctgtgctgtggaatgttccagggcacagataggttcaagatattatgggagaagaactgaaggaggggtcccttcccagagctattttagagcaggagtgacagacacctgtatttaacccagctgatcctggctaatttttgttcctgaggaaggaatattttgggtctttttctttggactttggcccactctgtcccatagcaaatttttatgaataacatcagtgatataaaatatttatctcccttttgttttgagatagggtctctcattctgtcacccaggctggagtgcagtggtgggatcttggctcactgcagccttaaccaccctggctcaagtgatcctcctgcctcagcctcccaagtagctacaggtgtgcaccaacacacccagctaatttttctatttttttgtagagacagagtttcaccgtgttgcccaggctggtcttgaactactgggccatggcctcccaaagtgctgggattgcaggcatgagccactatccccagccaaatctttaccttttgagtagattttattttgttaggtagacttttttttttttactgtgtataatacacataacatttacaatttgcaatttaaccattttaagggtacagttcagtggcattgagcacattcacacagccatcactgccatccatctccagaactttttcatcttcccaaaatggagatctctccccattatacactaactcccattccctctattgccagcccttggtaaccaatgtctactttttgtctatgaatttgtctatgtctattttaggtacctcatataaggagaatcataatatttctcgttttgtgtgtgccctgtttcacttaacataatatcctccaggttcacctgtgttgtagtatgtgtcagaatgccatttctttcttcttcttttcttctctatctttctttctttctttcttttttttttttttgacacaggatctcgttctgtcacccaggctggagtgcagtggtgtgatcacagctcactgcagcctcgacctcctgggctcaagcgatcctcctacctcagcctcccgagtagctgggactacaggctaccacacccgctaattttttcattttttgtagagatgagattttgccgtgttgcctaggctgggtcaccattttttttttaaggccaaataatatttcattgtatgaatatgtcacattttgtttatttcatcgtttttcaaaacagaaacattttcttttcttttttttgagacggggtctcgctctgtcgcccaggctggagtgcagtggcgcgatctcagctcagcgcaagctccgcctcccgggttcacgccattctcctgtctcagcctcctcagcagctgggactacaggcacacgccaccacgcctggctaatttttgtatttttagtacagacggggtttcaccgtgttagccaggatggtctcaatctcctgaccttgtgatccgcccgcctcggcctcccaaagtgctgggattacaggcgtgacccaccgtgcccggccaaaaacagaaacattttcacataaggaaagtgaaaagcagagaaaacccaccagattcccattaatacaatggttctctcatttctcttttgctaataattatacctccatcccatccccgaacaatcctgtcctcccagggctgctccaaacctctccaagaaagcagcttggcagagcatttggcatttggtaagggccaaaagttacggggaaacaggtctgataaatcaagttaaaggagagcaaggaaacccctataaagcagcaagacattttattgcctgggttataaattggcctgaaggtatttcacacatcagctccaggatgacttgggccacacattgagtaccactggattaactactcaacttcatacgggggagactttgaagagaaccatagtcatttggaaatatgtggtctggtatgttttaaaataaaggtacaataatcaagttaaaaacaacttttcaatgacttgttgctttgaaaccacttaggccacccctggttaaccgctgcatcccttgggtgctcagccagggctgcatgagttggtctcaatcagcacttctcaaagatccgagagcatcgcagatgtaggggaggtgcaagggaagccattattggaaaagtgtgcacgtggctacctggagtgctgcaagctgctcccagcagggtctccccagtctcaaccactggttcattggttcggtttatgatgatattactttgtatctgcatggtccattgggatccttttacgtttcatttctttccagtctcctctaggacccgttttcttttttttttttagacatagttttgctcttgtcgcctaggctggagtgcaatggtgccatctcagctcactgcaacctctgcatcccaggttcaagcaattctcctgcctcaaccacggcctcccgggttcaagtgattctcctgtgttagcctcccgactaggtgggattacaggtgcctgccaccatgcctggctaatttttgtatttttagtagagacggggtttcaccatgttggccaggctggtcttgaactcctgacctcaggtgatccgcccatctcggcctccccctaaagtgttgggattacaggtgtgagccaccgcacttggcctgtttttttctctttctttctttcttttttttttttttgagacagagtctcactctgttgcccaggctggaaggcaatgtcacgatcttggctcgctgaaacctccaccctctgggttcaagcaattctcctgcttcagcctcccgagtagctgggattacaggcgctcaccaccatgcctcgctaatttttttgtatttttagtagaaacagggtttcaccatgttggccaggctggtttcaaactcctgacctcaagtgatccacccacctcagcctcccaaagtgctaggattacaggaatgagccgtcatgcccgacctcctttgttctaagtctctgccagcctcatctctgtcccagactccagaagatagcagatcctgctcaggagcatagaagcccagaggtcacaaagacttcctcaccaagctcctttccttccctcttcttgtggcagagcccctgaaatgaaatatgaatttcgccacctttctgcataagcagaagtatttattctcttcttttcccctttccttttctttttttcttttgaggtggggtctcactctgtcggtctcactttcccgccttccactggtaccagccctttctggatcacaccctttctcttcttaagaagctgcctcctcccttccatcaatgctccagggggcttttatttttcttttattttcggctccctatcaatcaaggggagggggacactttatctgaacctttggtgagcaacagcagcaaccggcagctgccagggcagtgggaacttcattttcagcgctgacgtttataaatgtggcacagagtaccagtagggactggaaaaaatcaaacagcttctccagaggtccctaggggctgctttagaatttcttctcactgggggctccttctctttctttgcaggcatgggtgggggtggggaatgttatttgcaacgtggaatgagccacattctttccctatcttcacaaaagaacttagcaggacccaagacccagggtgctgaggagtgcgaacatctgcctcactcttgatttggagaaaggtttggggtgaggggtgggaatgctgactctgttgctttttagtgatcagttgcctcatctgcaaaatgggagtaaaaatgcctgcctgtccacttcacgaggctgctgtgaagatcaaatgagatgtctgtgagtgagtgccctgaaacctgcgacaagcttaggcaacctggcgggtggttatgaaggagcaatggtgaggagcagagttatccagcaccccagggcatctggagagctttgaacgggctctgggcagaccttccccggactattccaggaacctcctctttctctatccctttaaaaattctgggctaggatccctggtggtctgttccaaacacaactggaatcgtcccaatgtcttctctaaacctttcttcctctgtccttctaaacagcaagaaaataaatgtgggcaagcctgagaggtgagagactgagagagagaaagtgagagaaagaataaagctaagattccacttggaaaagggggctgccaaggatgaggtgggaagtgggtcgcagttggttaatataataccgcgctgctgagagctctgcaggggtcctttcaaggttctgtatgagaaccttgcttagtgagatgagacccagcatgggcccagcaatcccacttcctttacattctctaaattttccagatgctgcacacaacccttcacctgctttctggcgtttctgtggatttcactcctacccaggctgtggttgggagccaaggggcagacaggatgctggcaatgcctagagcccttccctgactcccatcaggactgcaatgatctgtacagtattttctcctaagtcatttcctatacgtagcaagattccacccagcttcactccccagaggcaactagtgttgccagtttcttactatcctcatagacagaaaatttattttctataaatatttgttcaacactttatttatagaggttaggcaccacaaaaaggaaggatgaacagaggaccatgcctgtctgtggatctgagcaattcagtgctggtgggcaattgctgcccattcattgaaacaaaagctgtaagcaggacccactcttagtggaaagcaattaaccttgggaggtcacagcctgcacctgcaccttatcaaaatattccttctttaaaacaaatatagtgattccctaaaaaacattctagacagcaagatgctcttctaaggtattccaattcatgatgacgctttagggttccatgtatattggcccctcagacaaagcctggctggtccacgcctaaatctagctctaagagtggctatcaagagattctcactcttgctccctaggaggtaggtggtcatccttgttgacaattgccactgtcttttttcaccctaggcatctggggaggaaggcatgaaggaaatgagagaccagtacacatgcagaagatactgcagagcttagatattctaggagctagtactctgattgcaaccaagttcagaagcttggcaatgacaggctgagttatttggaccgattatcccagtaaaaagaatgaaaaatgctagataaaatatcaacaacatcttaaaagccttgaagagttaataaaatagtaaggaattaacaggccaacatggaagagaaaactagaggatgcatagaaatcacttttccgttaaagagcatctgtcaattcttgcaaatctgaactttcattttgatggtctggtagagtaagggggttggaaatccaagcccagtgcctgctcattgtggagactgtagtagaagattctcccctcaatatgctgagacccccaaagggctacaccatcagggtaagggtaaaccaaagtaagctagccccattcacattgcctgggtactccagggaacctcaggctggcaactgggtttagatggttgtgccgctgatgcctggcagaaataaacacaatgtggtgtaaaagaaggcactttcataagaaaataattccaatatatttgttcaagcacagctaccagaatattgttaaagacagccaagcctataagaaaataaggctccatgagtgagactcagagaaacaagagacaaaataaaaaattcgtgaggacttcacacattaaaatgatcatacgtagactataatacaatcatgcttactgcagtcaaataaataaaagacaagcttgaaaatatttgcagggacaggaaattatgcaaggtaacaaaatggactaaagatatagtaacagcaattaaaactcaactcattaatttaaaaacagcttagatgcagtggaacagagagttagcaaagtagaagataataaggagaaattacctggaacacagcatagagattaaaaaaaaaagaggggagaatagagaagataagagatacagcatgcagagatctattgtatgtattttgcagaaagagggggaagaatgaatagggcagaggaacgtatttgaagagataatggctgagttttccaaagcacatgaaagacaccagtctacagattcaagaggtgtgaaattccaaacatgacagtcctgtctaaaccagcagccaggtgagagaggagggaggggtacagctgagccttcccagctctagcatgcttaaacttcccataaaaaccccagtgagaagaaaaagctctaggcttctcaacaagaagcaaagccttctggctttggcaccaaagattccctggctcttctaggcctttctcccttttccactgcctcaaggcctcttccctagctaggtcctggtttcctattatccatccatgaaggtcttcccttatttttatttagttatgttcttactctctctctctctttccttctttcttctccttcttctcctccttctcctccttctctttctccttcttcttcttcttcttcttcttcttcttcttcctttttttagagacaaggtcttgctatgtttcccaggctggactcaaactcctgggcttaagtgatcctccaatctcggcctccagagtagctgggactactgatgcatgccacaataccacgctaggctttaccttaaacctctctttctctcttgacttcaaaggaaggaaggggacccaaggcagaaacagaaaaaagaacagaataagaaacagtgagaaaaaagagtaagaaagatgtgtctgcaggcatcgtggccgagagatgggccagactggcttaggggccagtctggaggcaacaagcagaaggtgggcactgaagaaggcttagaagttgttatccagaattctgctttcctttcctcctttttctcaggcttcccttggattctctgcctccatgaccctatggctggcgggatagtgtggggaagacctgagtttgcatatctgtctatgttccctaataaacagcgaaatcagcaggtctggctgcagagctaggaggggaagaccacatctacccagaaaggagactactagagggcccaatgctggagttaatcttcctgcatgctgctgaatttttgttgccctgttacctatcaagccaatccagctcatgcaaaagctgtttacttttcctgctcccaatttccactctttccccaactccccactttagggtatagtgatatccaggctgtgaggcacaagaaagacatggaaatgcatctctgcagagaagggagggaaagctgccaacaggggacacatacctcgtctccatcccagacacaccctcacctccacagagaaacaggaccacttctgagcactctgatttctcatttttcccactgcctgctgagctttaatggggccttctccaaaagcctaggggtagaaatatacacactcggatgtacatgtgtatgaagacaccacttaatgaatacctggggatattttggggcaccacagtcagataagtgtgcaaatatggacatgtctttatgtaggattgacagagaaagacctggaaataaggctaagaagattccattgtttacctgctgggaagtttcgcctggagacagatgaaagccactccaccctccttttccttttgtctcagtgcatttccttttgtcccagtgaggtctgagggtgctcattcacgagtttatcctgcctgcccctcacttccaggctaaatcatgactttgtattttctcgaggttatggtcttagttcccaagacttttcttattttctgccctcccctggagtctgcctagcaactgtactcttgtatcttgagggagaagcattgactctaatatatgtcatttaacaaatacaaaggaagcagaaaccagggtctctgggtgttcaatcccctccacctcctggtctgaaggtgggtgctgtcctgggcactcacagagggcgctgtcagcctttgataaaccttgctgggccagcccagaacaggcatctcgccctccctgaacacccaatagcagacagctagagagctttgtgactcgagggcacctatgagagccagagaaactcactacctatcagtaaacaggagggggtgccttcttattcccaaatgtctcctacacaccatggaatactatgcagccgtcagggagaaggtgcccactcggtatgactgatgtggattgccaagataaagaaaatgaaaacaccagggtgttcttgtaccctacttttgagatgaataaaagagaatatactgtatatgtttgtctacccatgaacatctctggaaggacacaaaagaaaatagcaacagcgttgcttgcatctgatgaggagaactaagcagctgaggatagggtggaaacagacgtcctttccacagtggtctctttcgtacactatgttgttctatatgtatgtattacctacaaaaaaatgacaatgaaaagaaggctttttctccttaaagagcttgggggaaggcaggcatgcaaacaattacaatgcaatatgctcagtgttattgagatgcgcagggtgggaagggagtataggagagagactgtctaagggggcttgggggtgtcggggaatttggaagaatcacaccgaatgctaaaacctctctaggctcagcgttgcccgggcataaaggacacagtgagaagggacctgagacgaagctgcaagagcaggtagaggccagagtgtgaaccgccttgtgtgccaagctaaagaatttagattttatcctaataggaaataggcagctattaaataattttcagcagggagtgaccagttcagatttgctgtttagagagatgactctggcagggatgcggaggatagattaagaggggctaggatggggcggggagaaatgttttgaggttaatgcaataatttaggtaagagatggtgggtaggtgaccccgggggcaaagggagggaggatggcagagaagagattaaacctgagactcgaactgggccagcgatgtgtatagagaccacgcacaaagcctgctctgccgctctctgttttctcacgctggcatcctctgcacatttggatgccccagatgccccagcagctggcaggatgggtccagggagcccttcctggtctgcctgcctgcctccttgccccaggctccttggcaaagcagagcagggaaaagagaacagaagcgtttccctcgccatccaactcctaggtctctcatttattccttgctctctccggattcgggtcctctcattatttctgatctgtacagcttgccgcttccctggctcagctctcccacccccgtctgcaaagtgtcaatcaagccatcagatgagcagctcagcctcatatcctcagcgtctctgccccaggacacgagaagcgattgctgacacacacaagcagcaaggtgtaaggctgctggctctccctttaatagtcttccgatccagaatgggtgttaaaatggaatttgagtggatagcgtctctctgcctgtccctgtcaggacagccgcaaggacgggcaaccctgagagaaggggaagccttcagaagtcgattcgcttttcatttcaaggttgggccatggccagtgtctgctttcggaggagctgtttgaaattgttaatgagaagcagaatgcttgagtccaggaatccagggcagccttgtgaagtagggatggggaaatggaattgtcattttatctctgaagggatattgtattaaacaaagtgggggtgggggtatgggatacagagacgctttgtagcttccctggaggactgaacaataagaaatatcgagggcagcaggaagaactgagattagaacaaagagtgaaattccccaggccctggaaccaggggccagggagatttgaagcatctgcttccccgggggcttgctccttcttttacaaattgtgaatggatgtgtggtttttatagaatgtggcaactaatgagcatgaagctcaattactccaccaagttctctttcgatttttgatcgcacgtacacagaacacttggttgcagtgtgtgtgtgtgtgtctgtttgtgttctgcttgcctttctcagggttatctcatacacacatttctgcatagcagagtccagcttgttatttggaatagctacgtagtattccattgtgccagcgagccagagcttgttcagccattccttgtggttgagttatttcccatttttttatattgtaaaagcacagatatcaatatcttcatacctttgtctccccttgggatatggttccccaggttgaatttctaggtcagaaggtttgagctgttttacccggattgctgtgtattgcctcagccacctccaggagatcctgacaacccaaattgccaccctcctctatctctgtccccacagcactgacaacataagagattgtcatttttatttatttttgctaatttaataggcacataatagtaccttgaagttatttaattcccatttctttcattgctagtgagactgggcacacttccatgtgaggatttattgtctgcttttccttgtacgtaaactgttcatctcctctgacatcttatcaagagaaatctgggggctgatcttatatatttatatcaagcctttacatactcagatagtacatttttctcggttatgtcagccattttttattctggggagctgtccagttgtgatgtggatgctggcctgttccggggggtgggagtggcatatggagttgtgaggatttctggactcttgaaatatacatacatatatatatatatatatatatatatatatatatatatatattctggggttttttttttttagaagaaaaaaaagccaagcatggtaggttttgcttgtaacctagcactttttttttttttttttttttttttaggcaggcttgctctgtcgcccaggctggagtacagtggcacaatctcggttcactgcaacctccgcctcccgggttcaagggattgtcttgcctcagccacctgagtaggtgggattacaggcctgcactaccacacccagccaatttttgtatttttaagtagagacagggtttcgccatgttggccaggatggtcttgaactccttgcctctaaagatcctcccacctcgacctcccaaagtgataagataacaggcgtgagccatcgcacccagccagtcccagcactttgagaggcctacgtgggcagattgcttgagcccaggagtttgagaccagcctgggcagcatggcaaaactcttgtctctacaaaaaataagctgggcgtggtagtgcactcctgtggtcccagctactcagggggctgaggtgggaggatcagcagagcctgggaatttgagactgcagtgagctatgatcacaccactgcactccagcctgggtgacagactgaaatcctgtaacaggaaaaaaaaaaaaaagataaagaaaaatccagtccgatggcacctcctctctgggctcctgttttcctaagaacaaaagggctaggctgagaggacagccagttgccaagatcagtctgggggattacttgtggaatgagaagcattgctggcggccttggcaggccactgtaaggaggcagggcagctccctgtagtcatgtgggtttcctggaccattattttctcccactcattgtgggagaaatagcaaaatattgaaatcggaatcatcattacaagttctgactcatcctcagtaaagcacagtggttaaaggaacggattctggggcagacagacctaggttcacagttcagtgtctttcttttctttctttcttttttttttttttttttccatagagctggaatcttgctccattgcccaggctggagtacaatggtgtgattatagctcactgcagcctcaaactcctgggctcaagtgaccctcctgcctcagcctcccaagtaagtaagactacaggcatgcaccaccatccctggctaatttttaacattttttgtagagatgcggtcttgctatgttgcccagactggtctcaaacttctggcctcaagtgattctcccgcctcggcctctcaaagtgttgggattacagacgtgagccactgtgcccagcctcagtgtctttgtataccaggggtgttgctttgggtaagatagaatctctctaagccttcacgtcttcagccattaagtaatattttggttatggctgtgtaaaaaacctccccaaaatgttgtggctgaaaacaacaaccattttattctgtttcatggttttgtggatcaggaatgaagcttgactgggtgattcttctgcactatgcagcatcaattgggtcacttggtactatttggctggtgctaggctgggctggaggaaccaagatgacttcacttttctttgagacaaggtcttgctatgttgcacaggtttgtctggaactcctggcctcaagcgatccttcctgactcagcctcccaaaccaagataacttcattcttatatagagttctccacctggtcccaggtcctctccatgtgaactctcccatagggtgcctgcacttctaacatggtggctcagggctcagagagtaagggctccttggccaggtgcggtggctcatgcctgtaaccccagcactttgggaggccgaggtggtcggatcatgaggtcaggagttcgagaccagcctggccaatatggtgaaaccccgtctctactaaaaatatgaaaaattagctgggtgtagtggcgctcgcctgtaggcccagctactcgggaagctgaggcagaagaatcgcttgaacccacgagtcagaggttgcagtgagccaagatagtgccactgctctcctgcctggatgacaaaacgagactccctctcaaaaaaaaaaaaaaagtaagggctccaacataagaagaggaagctgccagtctctttagggctgtgccagaaagtgtcatggtatcacttttgccatattttatgggtcaagcagtcacagagtctgtgatagaaggagtgaaaaagaatttggggccatccttaatctgccaaaagtaggcataaaaatactcctaagccaggtgcagtgtctcacacctgtaatccaagcttttgggaggatgaggtgggaggattgtatgagtccaggagttcgagaccagcctgagcaacacagtgagccctcgtctctacaaaaaataaacaaaattagctgagcatggtggcatgcgtttgtagtttcagctactcgggcggctgaggtaggaggaccccttgagcccaggaagtggaggctacagtgagccgagttcgtgccactgcactccagcctgcgtgacagtgagatcccagagatcctctcaaaaaccaaaacttcaaaaacaaaaacccgcagaaactcctagggctatgaggagtaaatgagataactcatgcagaggcaaatttaccatgaagcaaatgaaacttcaaccatgggggtccttaattgaacagtttcttccacatccgggcatctaattttgtattaataattctccttttttctttttctcaaagagtaccctcgaactgtatgacaatcaagccctacccaaatgccagtatcagtacttactaagcatactgcctgggacagagagatgctcaacacggggcccctccaggcactgggctggcctggtcccctctctgtggctgaggagagggctcctcctctcactctgccctttctgtcttttcaggatcatttcttctttcttcaaaatgaaagtaaaacatgctgggaataatttcataattacaaaactgccctcccaattggcccctgcctctaccccctgacctcaccacccaccagggaggtgggtcttattctgggcatcgtgccaagttcttagcggggccctctagaatctctaaagcaaatcaggctgaagaggggaaaaccagcagggggaggcagcattcccggtgcccagtatggtctaggaggcattgaaattccagggccgaagtcctgagacaaagatcataatgagacaggaaggtggcaaaggaaggagcccatttgcatgacaataattgagccaagaatagaaagccacagggatgcaagggtgaggctggcggctgagctgggctaaacctcacaaatcagactacccagctctgctccgcaggggaagggagactgagccctgggccaggcttggcagagagggaagcgggaggacacgaccccagggcattgtgggaacactggccaggctggactttgccttcctcctcgtcctttagccgggagcctgtctttgcttgcctttgcctttgaggctctgtggctgtggggctgagtggcatcatggcggctcagaaagatctctgggacgccattgtgattggggcggggatccagggctgcttcactgcataccacctggccaaacacaggaagaggatcctcctgctggagcaggtactgtgtcccttctgcacccccagctgtaaggactgtcctaccctcctcccctgcagaagggttttcagagccagcaggctacagggcaaggccaaagggactgaatcatcaaaaattctgtgtaatttgtatcttagctgcctagtgtgtttcatggcaattcaaagaagtttcacatccctcatacccacattgggtttctaggcacatttcctctttctactgcttcccagttcctgcccttgaccaagcgtcctaggccctgttctcttccttctcactactctttcccttctgtgcccaaatggttgatccccaccccagaaaaataattggttctgctctaggtaacctaaagtaaagataattttgcctagaggcaaaggttgatttatcagcctaagaggtaggattctgtcttgcatattcctggcctctcacaccagaacccagcagaagcttctgttttttttttttattttttattttttgccacctccagataatagcagcctccttgtttgacacatgataagtgagactgaggccttatttttcctgctacgcagtgcagtctgcagtgaccactgcatatgtgggtgggccctgtgtgtctgcagggtccttcgaggacagggccacccagctatccactgcagtggactctccctttccattctgcctgcagctacccaggctggctatggtttgctcttcttggtaatgagccagagtagttagaaaccttcttcatttctctatcagttttctcaaagcccaagggattcctggttcatcctctcaggaaactcattgttgctgaatcctgaggtggttctcttaccctgagtgatctgtagccacagagaaataaagtcagcatcagtttccttgttcataaaatgaaggggctggagtagttgaactggaaggttttttctaattttgcttctttgtgaatctaagtgaggtgagattgcagcaggatggttgaagactagctaacaaaagaacttctggatgtgaacaacgttagcaaaaaggaagcctaagttagtgctattgaagaacttctatcttgattgccaagtcagtaaattggtcataaagagagaatttggaaagattgtgtgaatttttttttgtggggggacaggatctcactctattgcacgggctggagtgcagtggtactatcatagttcactacagcctcaaactcctgggctcaaacagtcctcctacctcagccttccaagtagctgggactacaagtgccaccacacctgatagtttttaaatttttgagaagactgggtcttgctatattgcctaagctggtcttgaattcctgggctcaaattatcttcctgtgcataatccttccccagattgtgtggaaatatttgaaggataaatggctcctggttgacagcacatgctgatatggctcttaacaggggatgcagtgtgaggggtaatggcttccatcatctctcttgttttccacttccagttctttctaccacactcccgaggaagctcccatggacaaagccggataatccgaaaggcgtacctggaagacttttacacccggatgatgcatgagtgctatcagatatgggcccagctggagcacgaggctggaacccaattgcacaggtgggctgtgggaggaattccttgaatcgtggggctctgcacctgcaggtacttttagtgtgtgaagtggcagcgccatggaacatttggaatgcaatgggagggacacaaggcctcaagaagtaccagatgcatggaagagttctgctgtcatggtggtcaccccacaggtccagctgactctggccaggctctgcgttgcaggactgggttcagaccatgtgtccaaggctagcagaagcagtactggaaagcctgctggcaaggcaccgtgtggcagatgcccagagtggacaggagtctgctggagtgtgtattttcaactctgtggaggcctctgcaactcttttagggcaggggttgagatagaggaggaggctgctttcaggaggattcttttttttttttttttttttttttttttgacagagtctcgcttttttgtcaggctggagtgtagtggcgccatcttggctcactgcaacctccacctcccgggttcaagtgattcttctgcttcagcctcccgggcagctgggactacaggtgcgcaccaccacacccagctaatttttgtatttttagtagagacagggtttcaccatgttggccaggatggtcttgatctctcgacctcatgatctgcccttctcggcccccctaagtactgggattacaggtgtgagccaccgtgcctggcccaggattctttatagtcaaatcaacatcctaacttttcctgaggggtcctcaccccctttagcagccctataaacccattttgttctctctgagtaccttttcctgtaggaacaaaatggggacgttccccaggctggattgcttgccagggagtgagcctccacgtctttctctgctgccttcatggctctctccaacccttgacctttcaaacactcatgggaaagaaagccaataatctgtgatgcaatgggaactttaaccatcccacctccctcccacctcctctgtgactcttaactgaacttcctacaaaccctggctctacctgatagggtggtggttattttaatggccaggaaccaagaggttagtgttctgttgcaaaaataccattaacttaagaacaaagtgaaatccattatgcaaatcagccagggcagctaattacagatttattcagaggcagctaatgcacccagcacccaaataaaggagcatgtcttgctggtgggtggcccggcagagggacccctctctgtcagttgtctgtgaatactgctgagcatcttttgctaaaagaatcgccctgggcctcagagggcacacttcctcctagcacacaatgaggcaactaagagacgttagagtgtctggaatctttccgagggagacgattctggagtgagacaggcttaggtttgacattgtgctctattccacaccagttgtgtgatcttggaaaagtttcttgacttctctgtgcctcactttttacgatagggctctgagaggattaaatgagacttttgtgaaatacttggcccaatgtctagcacctttcaataaggggcagtcccttattgacccattctgggtcagctgcattctgttccattgagcaacagtgggaggaaaggcaggaggagacagatgggtgcaacaaccacagataccaaggggagtggcagcaggaaagagggagagggatccttgggtaggagactctcagaagcgcacaatcctcctctttgccaggaggacaggaatttggacgggctttggaactggacctggctctaaatctcagctctgacacgctcagctgtgtggtttggaacgagctgttgaacctctggtgagactcagcttttttcatctgtgaagtagggatactaatacctgtgtcatggtgctggggtgaggataagtaggtaatgggcttagaacagcacctggaaaaccatcttcctcctcctcctcaccatatatgtagtgtttacaataagaaactaggctgggcatggtggctcacgcctgtaatcccagcactttgggaggctgaggcaggtggatcacctgaagtcaggagttaaaaaccagcctggccaacatggtgaaaccccgcctctactaaaaatacaaaaagtagccaggcatggtggtggacacctgtaatcacagctattagggaggctgatgaggcagaagaatcgcttgaacctgggaggcagaggttgcagtgagccgagatcacgccactgcactgcactccagcctgggtgacagagtgagactccgtctcaaagaaaaaaaaagaaaagaaaagaaaagaaaaaactaagagttgcctaagtacctgacacctataactcattccattctcctcacaatcttatgagagggttgctgccgggtagtcagggtcttatcccattaatgcaaatcacagaattactatactcttaagtctagaatagaggttggccagctttatctataaatggccacgtagtaagtatcttagcctttgcaggcaacgtggtctctgttacaattattcaactctgccattgtagtgtgaaagcaagatgtaaataaatgagcctggatgtattctaatacaactttatttatagacactgaaatttgaacttcatataattttcatgtgtcactcaacattattcttctttggattaaaaaaaatcaacaattaaaaaatttaaaaaccatcttggctcatggaccagaccaaaacaagcagaaggccagatttggtccctgagtggtagcttgctggccctgggtgtggaagatacctcaaactggttaacttgtccatttctgtctccaaataagttcatgcctaaatcatcccaggtcaaaagactgctactatgcatttaaagacagggaaatatcacagcccttcttaaaagaccattctgatgtctcatagccccagttacgaaaaatgaaaagtaatgtgaatatgctttaaaaacctctagagtgctaagtattcttactactattgttattattctattattataagtcctttcttatggctaacctaatgtactcaggcacaccaatttatttggttcttttacttagcagggacacagagcagatacttcccattctcagaatggtatctgaatacagctctactacctttgggctaaaagccattctaattcctttagcttttactgattcttattttctaaatgattcatcatctgtgtggttcttacttttccccaggtttttctagaagaaccagcacaataccataatactactgatagatatgagcatacttaatgctatttgatgatgattaaaaaaaaacctttaggagttggcagttcaggtggttgtccagtgcttttcattctgtttagctgcttcctgtgacagcggcatactaaacatgggtgggtttgggacatttgcatatattctgggaacagacaatgacacatgtgtcagatcacaaggtctgaatcttttgtgatgtgtacagccaggatgctgattccaacagcaaaacccagctccctggcccatctctttcctgccccgccttctccctttgagtcctactgtctagctcctgacctgggctgcccctgcttagctgacagtatcagacaagatcacagccgtaggcagtacagctgctggcagaacctggtggccccctctgcagctgctgtttcttgtgtctgcgaagtgtctggcttgtcagccacatcccctccctggagcagtctttgttaaccaattccacctcggcccactgaacggaagatgaaatgcctagagctcctccaaaaccaacaaaggcagcagccattaccaagtccccattcgaatcccttccccaaggtgactcagagctggcttgctgggcatttttaacccacagaggggagagctgaagcttgggatgggagatggcaggtgcagggagagccgtctcctctcccaattcctccccactccatcctacaccctgtcctgctacagtaactggtggaaatccctgatcaccaactccctacatcatatctgaggcattagtcgggctatagcagagtcaacaaggccctcgggaggaatcttcaattacctcttcctagtgctggatcaagctagggtcaggaggaaggaatagttcatactaaatgctcttgactcagctgatgggcattctgggaggtgggagctgcactcttttctagggttccctggcaacccatgtgctggctttcagtccttctttgtagctagtcctgaccattcatttcccggtcattttttatcctgctgatgcccttgtctcctctcacccttctccttcccaaacttacagcccaggtctaagcagaaaaaaagaagacagggaggccacgaacacaggggtgagaaattgatgcagaatgagcagtctatttgttggtatctagaaaaagccattaagaaaataagcacttaaatgattttcaatctgcccatggaagccatccatcttcatactgggaggaaaaggcccattctccaatcccggttttgactgactggtttccaattctctaagcatttcccataggagcctctcacctatctcccataatcacaggcctttgcatttccaggcagtgttttacatttatttccgatttgctcataatggtcaaaaatctctctccaatccaaggcatttctccagcagcgcacggtttccctcaggccaaatagctcagctgtgatccacggaaaatgagaatttcccaaacacatcttcggactaggggagggtctggcatcacacattcagatggaaaatttcccactgttatatcaatatctgggctaagaaagaaatgccacaggggcagagagctggagcaaaatgattacaatcggcacaattacattcaccggcagaatcagctcgctgattactcccagggatggggagctcccgcttcatccaccacaggatggcttgggaattagaacatcactcagcatttcataattcaacagatatgcccgttgtcttggcatgagttcatttttcccacatagtacatccctgtaagaggagtcatttcaaggaaagaaggaaagaaggaggaaagaaaggaggaagaaacaatggaaaaagggaaaggaaatctcagagtatatgagaggccaaagctggtatattgcaggcagagattagaatatgctgctctggaatttccaggtcagggatttcacattacatctgcttaggtgtggtttaagccaggtctgtcccagaatccctcccagccaggaccccattgggtaaaaaggactcaaggaaatacacctgagtgacttcatacttatttgttgagtaagaagtttactagggccgggcacagtggctcatcttataatcctagcactttgggagatcaagacagaaggatcgcttgaggccgggagtttgagataggcctgggcaacatactgtgtgactcttgtgtctacaaaacacaaaaaattcgccaagtgtggtggctcacgcctgtagtctgtagtcccaaatatttgggaggccaaggcaggaggattgcttgaggccaggagtttgagataggcctctgcaacacagcgagacccctatttctatacacacaaaaaattagccaagtgtggtggcatgtgcctgtagccctagaaacttggagggctgaggcaggaggagctcgcttgcggctgcagtgagctgtgaacgtgccactgcaccccagcctgggtgatagagtgagaccccatctccattaaaaaaaaaaaagaaaaagaaaaaaaagtttggccaggtgcagtggcccctgcctgtaatctcagcactttgtgaggctgaggtgggcagatcatgaggtcaggagttcgaaaccagcctggccaacaaggctcaatacaaaaatgagccgggtgtggtggtgagcgcctgtaatctcagctactccagaggctgaggcaggagaattgcttacacccgggggcagaggttgcagtgacctgagatcgcaccactgcactccagcctggatgacagagcaagactctgtcttgggaaaaaaaaaaagtttactaggtaagttttcattacctctgaaccaatctgaagtccttttgggggccacagaaaaaagacagtcagctgagagcagggatttccactgcatctttcctctgttgagcttcgaagaggcagagctctcgttgctatctcgctggtggtgaatgctgggtaggcgggggccatggcaaatggattgggcacgctgcgcggctctgtgtactgacacccgccccagggcccacggtgtccctaccccctcccaatcttctctttaatccccccaaccagataatgtgggatttggaagcatgtaatatccatgagactccattataggctattacgagctttacacccactacctgggggatgtaccaggccgctgctgggcagtgcagcagctgcaatggagaaggaccacgggaacagtcccaaaggccagagtgactcttccattgtttctatccgtttccccccaaaagggagctctggtctcttgtgacagagaggcaggaagcatgaaagagaaacagctttcactcccttagggagtaaaagcatagagggaggtacagggagaaacaaaatcacagtcactgagtgtattggtggagccctaggagaccatctatcggtgtttctgcatgagaacaccactggaatttggggtggaatcttctcgagcattgcaggtgtagcatcccgggcccctgcccactaaatgtgagaggcagcaccaggcattgtgccaactacaaaaatggatcatgccattttcagttgtccctgggtgggcgggtgagtgggcggtaccaccctggtgtggaaccatcagttgttcaacaggcacgttacagaggaggaatctgggcccagagaggtgagtgacctaatcaaggtcatgggcaaggtgaagccaggactagagacagagccagatctctcagtttaggaccctttccacaaaacaggcagcctctgaggaatgagagacagagacagacacacaggaagggacaaacatatatgacaagaaagaaaaagagggaagcggggagggcaggggagaatacagaacagagagatcaaaatagtgaatgggatcaggggacaggaggaagggaagaaatttcatcaaactgactgaacttccaccacttccaagccatgggacatgaaagaggacttaggatctctgccctcaagggcaggatgggtcctgagaaggggcatagaggacaagaaaaccaatagtgagagcccaagggcagacttgggaatgggctggaaatcagcatgagaatactgggattctaccgactgaatctagatggcttcacctcttctctgaacatgaggccatgactcctctcagggcctacacctggacccgagatccctcctgaaggagagcaaatggcccagggctttgctttgttttgctttgagacaggggcttgctctctcatccaggctggagtgcagtggtgcaatcatggctcactgcaaccctgacctccctggctaaagtgatcctctcacctcagcctcccaaatagctgggatcacaggcatgtgacaccatgcttggctactttttaaaaattttttactttttgcagagacagggtctcatgatattgcccaggctgctagtgaacaaattagtggcctcaagtcatcctcctgcctcagcctcctgaagtgctgggattacaggcgtgagtcgtcacatcaggcccaggattttgaaacacaccttcacctaggtgacttattttttaacaggcagactggattactgctgctgggaatgaaagagaatcaagaattaaagacaatccaggccaatctgtcgaggcagagggtagaacaccagtgtctttcatctgaggaactgaagcaacgtttcccaaatattcggttgcccaggggagaagtggggctcttggacaattccggaggagttatctatgcatataaggccctcagagccctgcaggtaatgtcgtatagcactggggcgatgcaggtgctccctgctctgggtgtcctgggtcccaagcagccagcccaagacccccctctggatgaggcctttgccctgcaggctttagtcttgacttttccagcagggcagtgaaatatatgcggctggccttgtcaatacaggacaggtctagattctgcactcttttctgccccaggcaaaaggctttctgtccaccagggtgaaccacatacagaactaattcacctttccctgctcctgccctttcaggatgcaattcgacagctaggaggcatagtgcgtgacggagagaaggtggtggagataaacccagggctactggtcacggtgaaaaccacctccaggagctaccaagctaagagcttggtcatcacagcaggtccttggaccaaccagctcctccgtcccctgggcattgagatgcctctccaggtaagaggagctggaagcccgagagttggtgctcaagagaagccttggaaccagatggagtcaaatttgagtcctggatctgcctcttgctagtggacaaccttgggcacattcattcacctcaccgagcctcagttttatcatctgtaatatgggggatgatagctacctcatagggctgttggagaattaaattattaggctggtgcaaaagtaattgcagttttaccgttcaaagtcatggcaaaaaccacaattacttttgcactaacctaatatatgctgtatataaagcctttaagaggccggatgtggtggctgacacctgtaattccagcactctggaagaccaaagcaggagaatttcttgagcccaggagttcaagaccagcctgggcaatatggcgagaccctgtttctacaaaaactaagaaaaattagccaggtgtagtggcgtgtgcttgtagtcccagctacttgggaggctgagcccaggaggctggcctgagcccaggaggttgaggctgcaatgagtcgtgattctaccactgcattccagtctgggtgacagagcaagaccctgtctcaataaaataaaataaaataaaataaaaataaagcccttaggacataacctggcttatagtaagcactcaataaacctgaggtcttattaattcccgaaaagagacagaaatatggctgggggctgggtgtagttatgggagaaaactaagaatgggagaagagacagaggctcagagatgtttgtgcatcataacacatgtaacaggtaaacaacatgagaagtgggagagacaaacatggatgagttcaactgggtgtccaggcttgtgttagagggccgcaggggcccagagaaactgctttcattgctgtagagttccatggcttttcttcatttcccacttcctctccctgcctcaagaccctgcggatcaacgtgtgttactggcgagagatggttcctgggagctatggtgtgtcccaggcctttccgtgcttcctgtggctgggcttgtgtccccaccacatctacggactgcccacaggagagtacccagggctgatgaaggtgagcggaaagaccgagataaggcaggtagatgccagtgcagattaggggaagctgctctaactttcccctccatagatgcccttgggtctcggggccagcagcaggagcctgcttcactcatggcgatttgcaaggaaagaccctcagctgccctgaggcccagcaaaaggagcccttcctttgcaaacatagggtggttgcagggaccaacagctaagcagcctcaggtgacagcccacagcacctgccaggagtggggaaggctggaatgatggatggggctgtcctgtgtacacgcctgcccttcggctgtgggtgtgtgtggaaggccagccctcaccactcatgccactctgattgggagccaggtcagctatcaccacggcaaccacgcagaccctgaggagcgggactgccccacagcacgcacagacatcggagacgtccagatcctgagcagctttgtcagagatcacttacctgatctgaagcccgagcctgctgtcattgagagctgcatgtacacggtaaggggtctgggcagccttgctgggccccctcaccactctacagaagggaagaaggagacagaccttgcactggccaggcccgattgtttgacccctgacatagtgtgtgactttaaacaaacgggctcatttctgtgggtaggttcacctctaccagggagggtcctgttcgaaattattcctattcttcttcattaggaaactaggttatgcctggcagtcggtccttcactctgattcccagaagagctctaaaagattttctggcaagctcctccagttgagcaggccttagggacaaagagaagagacagatgtcaccacggcctaaggcatcttggctaaagttagtttacaaagattaactgaacacctactgtgttcgtagctctgtgcgagaagaaaggcagccggacaaatgaaaaagactggcacacccagaggggcacgggcatgcggaaagcatccttgtgcctcattccatcctttctggaaagaaatccagcccatccccttccagttagagcctgcagttctttctcttccctcgagcctcaaagaacacaaggtgtgactgtttctttctagaatacccctgatgagcagttcattctcgatcgccacccaaagtatgacaacattgtcattggtgctggattctctggtgagtctgagctggggggaatggggtgccttaaagctgacctacctcagtgccaggtgaaatggtattttccacactcttagctgcccagataggtgtgaagcctggacattgtaggtataaggaggctgggcagtcagaaaaggggtattcatggtgggaggccacttctggctttgggatgtgaccaggaggacagtcagccctgtctgggtaagtaggggatgtccagagagctcaacctctgtctgtgaagctgcctgagagtctgctcttcccttcctagggcacgggttcaagctggcccctgtggtggggaagatcctgtatgaattaagcatgaaattaacaccatcttatgacttggcaccttttcgaatcagccgtttcccaagcctgggcaaagcccacctttgacctctggccagaagcctcccttctgtgcacaggagccagtttcacagatggagaagatgtctcagatgaagggagtgtccctgagatatcatccttttcttctgcctcgcctgaatcccccataaacaccagatgattgagtctaccttctttccttggcccgctccctttttcttctgcctcacttgaatcccccgtaaacaccagacgattgagtctaccttcttttcttggccacctccccattcacaactactttctcgctcccagaaggttgatcagatattctacaatcacagagtagcaaggacgtttgagatgggtatatcagtaagaagagggcacaagaactggctctggagaccaaagcagttgttaaaaattctctttgctgggggccgggtgtggtggctcacacctgtaatctcggcactttggggggctgagacaggcggatcacctgaggccaggaattcaagaccagcctggccaacatggtgaaaccctatctccactaaaaatacaaaattagctgggtgtggtggcgcatgcctgtaatcccagctacttgggagactgaggcaagagaatcacttgaacccgggaggtggaggtggcagtgagccgagattgcgccattgcactccagcctgggcaaaaagagtgagactctgtctcaaaaaaaaaacaaaacaaaaaaaacctctttgctggtatatttgaagagcttgggatggatttgactaaatctgccccgaggagggtgaacaaggtgatctcagagatcactactgctcttggagttccttctcctaaagctaaggccagcctccatcacaaatgcccataaaatctggctcgtctttgatgaacaataaatatttgttgaacaaataaataactgccctgcattaagtctgtagcgggctttcttttctgtgtgacctcatttcttccaggctctaattgtctaaattagcaccacagaatccattaacccaggaacccttggagtctttatcccctcaatgcgctgcaccccctttctctggattctttgtctcctcctcaccccctctctggttgtgtgaagatgctcagctccccagtctctcattaaggtgtattgtcaggtccttatgaagatggagctgttataccagaaagaaagagagagacacactcgcttagaaaccctgttcaatgtttgaatgttaaatgtgccattttattatcattaggattgctcccacttaatgaaacagcattagcaccgagttggctggcctccttgcactaattgctttggaagggaacaggcttataaccaccccagggtgggtggaggggtgaggggtggtaacagggactcgagcaagtctggatgcactcagatgaaacccacctggaggatctccacatcgggccagttcaaccccagaacaggagctaaaatgctctagagagaaaaactgggactgggagtggcagatgtgttagggggagtcacagagtggggaggagcaggcagtgagaatgacagtacaaatatccccaaaggaaatacaacacagaggaaatggctcttcaactgcctgagtccttaaggtcctaggcacatgtattagcactgattctccagtgagttataaaagccagccaaggccgggcgccatggctcatgcctgtcatcccaacactttgggaggctgagcggggcagatcacctgaggtcagcaggtcgagaccagcctggccaatgtggcgaaaccccatctctactaaaaatacaaaaattagtcgggcgtggtggcgggaacctgtagtcccagctactcaggaggctgaggcaggagaattacttgaacctgggaggcagaggttgcagtgagccgagattgcaccactgtactccagcctaggtgacagagcaagattcagtctcaaaaaaaaaaaaaaaaagccagccaagcctgtcaaccccatgccaagtctgctttttgtgtgatctcagatggttccctgaacctcagcctctgtaaaatgggagtattatatctgtaaatgggaataataatgccaaccagctccacaggggtgtctgaggatcaaataagatcattcattcatgcatttgttcaaaacacaaatactgagtgagcctctattatgtgtcaggcactatgtgaggcaccgtagatacatcagtgaacaaaacagataaaaatccctgttctaaaacagcatggttgttcctcaaaaaattaaaaatagaattaccatatgatccagcagttacacttctggtatatgcccaaaagaactgaaaacaggatctcaaagagttatttatacacccctgtttagagcagcattattcacgatggccaagaggtagaaacaaccgaggcatccatggatggatgaatggataaacaatatgtggtatgtacatacaatgtaatgttattcagccttagaaataaacggaattctggctgggcatggtggctcacacctgtagtcccagcactttgggaggccgagggcaggtgggtcacttgagtccaggagttggagaccagcttggccatcatggcaaaaccctgtctctactaaaaatacaaaaattaggcagggtgcagtggctcacgcctgtaatcccagcactttgggaggccgaggcaggtggatcaggaggtcaagagatcgagaccatcctagccaacatggtgaaaccctgtctctactaaaagtacaaaaattagccaggtgtggtggtgtgtgcctgtggtcccagctactcgggaggctgaggcaggagaattcttgaacccaggaggcagaggttgcagtgagccaagatcatgccactgcactccagcctggcaacagagcgagatcctatctcaaaaaaaaaaaaaaaaaaaattagccaggtgtggtggcacaagcctgtaattccagctactcgggagactgaggcataagaatcaattgaacctgggaggtggaggttgcagtgagctgagcagcagagcacgaccctgtctaaaataaataaataaaaataaataaataaataaataaataaagggaattctgatacatgccaccacatggatgaaacttgaggacattatgctaagtgaaataagccagtcacaaaaacacaagtggtattatttcacttcatacatatgaggtatctagggtagtctgagtcatagagacagaaagtaaatagtggttgccaggatctgggaggaggaagaaatggggatttgtttaatgggtacaggttttcagttctgcaggatgaaaggagttctgtagattggctgcacaacagtgcgaatgtacttaatgccacttagctgtagacttacaagtggttaagatagtcaatttcgttacgtgtttttgacgacaatttttaaaaaaatctcattcttttttttttgagacacagtctcactctgttgcccaggctggagtgcagtggtgcgatctcagctcgctgcaacctccacctcctggattcaagtgattctcctgtctcagcctcctgagtagctgggattacaggcatgtgccaccacgcctggctaattttttttttttttttttttttttttagtagagacggggtttccctatgttggccaggctggtcttgaactcctggcctcaagtgatccacctgccttggcctcccaaagtgctgggattataggcgtgagccaccgcgcctggcctaaaaaaaaatctcattcttacaaagcttacagtccagtgagaaggagacacataggcaattcacgtaagtaattataaattagaaggtgataagtgctttggggacaaaacagaggcaggtgatgaggaggtgacagggagtgctgggggagggtctgacctttcaggtgggtggtcagaggaggactcacagaggagggcctttgagcagacttgaaggagaaggagtgagccatgcaggccttcggatgcaggtgaaagaatgtgatgagttgtaaagcaaggtattgtgttatcactggtggggacagacaaatgagacacagagaagggccagaataagatcccaccagctcccaagccgagaaagttgggaagctaagatgctcagaatgccccctctcaccccacagctgcctgcagttccctctggcttctctcagtgccaccccttcccccagccagctgcagctccccttccaaaatatccagccttattcagcttgttggtgacagctaaaggatggaccagtgtctcccagaggctgagaaaggacgagtgggggctgctcccaagccctgcctcagctggcggaggcctctctagatgagcacaggaaagagtgggaggaggcaggggggtgagtgagggaggatgggtgtggggggatggatcgggccagcgaagaaaggagacagacaagaagcaggaaagaagagactggcaatgtgcagaccacgaaggcaggtcaggacctccagggatgccacgcacccctaaagccaaaagaaatgggcccagagtgcccaagtgggaggaaaccagccattcttaggtgggatggggtgggatagtagaggagatgttgggaatagtctctgggcctagaggaaagcaaaagtcattgtagaaggggtcctaggataacttgagggtttcagttatatcgaaggattttccaaagcagatcaaccagtattctctctctgcttcccttctgcctgagcgtggccaggcatcccctttcaggcaggccgtacatatcttcaggatggaagaaaatcaaaatcaatcgggcaggcaagaagagacctctggaagggcagctggggtctgcacaggctgcaggggagagataagggcaacgaagagaaagaggctggcctggttggcaagcagactgaggaaagcagaggcaggctgaaaatagattgggggcgggaggaaagaaagccaggccaggaaagaagggagagcagaggcaatcgatgccttcgtgactctgacccaatttttcatttcagcctcaccaaaagatgaggagatggtggggaaatcgggaaagactggcaaagagggaggagagtcagggcaaagtaatttgagttctaagacccaggcgatcgtggggtaccagtcagggatcgtggtggggagaggaggaggtgtatactatcctcagtaccagtttggaccccagcagagtttggcatcccagaatgggtttaacagcttaaggaatgtgagtgtacccaggaaggagggtcaactatctagaaaggtcaaaggagaaaacatggccgagtcggtctggagacagtcggctacaaagtaactccaagcctgcattttcttctcagaagagtgatgaaagagaatttggttttttaagtggtgggctgttagagcagcaagagggattaaagttagacttcaggaaatccatcccattaggtagattcatgagatactaaaacatgtagatgagcatacttatattctttccttggaaatcttaaaaaattagaagctctgctatttgggcctgtagaggctcgtctgaaggccagggcctcccctcaaaacttctggacgactgctggctagaaaggggggtctaagatttttattaccctgggggtagggtctgaaataaatatctgggcctaaggcagggctaatgcaggcacctgggttagggagaatgggggaggcccaaggtgggctggatccgtcagccctgaaggagccacagagacaaggggtgggattctaacaggcaggacctatgacatttacataactttgaataatgaataagcccagctctggggttcctagttagcactgctcatctgcatctttattcagctttataaatgattcagctcctaccccttcccccagcccctgcccagcctgcccccaagcatcggggtagttgattgctcattattttagactagatttgtttcaccaacattcagtgagacatggaatgggggtggcatgggagagaggaacaagtccaaaaggcaagtggagtgaaggggtcgggggctggagaatggaaacagcagccgtgggaagggaggctcacagctgcgagcagaggcacagagctaaggacgtgggcatcactctccaaaatgctcctggggccagcatcttcaggagagaaaagtttcttagattccccgacatgtgccgggttcaagtcccactcgaatccccgggctcccttacaactgctgccaaggcccccagcaggccccgtgctcagctccagcacagcactgaggcgttggagcagtcaagtgagtacagcccccagggaagttctcactttttcctgaggcaggaattttgctattttcacgcaaaaaaaaaaaaatctgctacgcttgtaaggcaggaacacgcaccaggtatattaggggagaaagaaataggaacagatgtacatggtatgagaatctgtagggaaagggaatgctgtatccacagggagttagcacccaccttgaaagaggaacctggagaagatgggcagccctcacctgatcggagcggctctgggagctgcctgatcagctggtcagaaacggggagaagtatttaatggcatgaacacggaagagttggccggaagctggtagggggaaaggcagagcatttctcaaccctggctgcacattataaccacctggggagctttaaaaaagatgatgcttgggacccacctaagaccatttaaattagaatcgccaagggagaaggccctaggcaccatattttttaaaaagctcttcaattttatttggatcctagtttaaacagaccaattttaaaatatatattataaaatacataacaaaactatataataaaatcagggaagtttaaacattgactggatgttttgtgttaaggaattattgatcattttttaggtgtgataagagtattgtgattatattttttaaagagtcattttctggctgggtgtgatgtcgcatatctgtaatcccagtgctttgtgtggccaaggtgggaggatcacttgaggccaggcgtttgaggctgcagtgagctatgatcatgccattgccctccagccaggacaaaagagcaagatcttgtctctatttaaaaaaaagaaaaaagttggctaggtgcagtggctcatgcctgtaatcccagcactttgggaggctgaggggagcagatcacgaggtcaagagatggagactatcatggccaacatggtgagaccccgtcactattaaaaaatacaaagaattagctgggcatggtggcacacgcctatagtcccagatacttaggaggctgaggcaggaggctcacttgaacccgggaggcagaggttgcagtgagctgagatcatgccactgcactccagcctggcgacagagcgagactccatctaaaaaaaaaaagtcattttcctttcctttcctttccttttcttttcttcttttcttttcttttttcttttcgagacatcctctcactctgttgcccaggctgaagtgctgaagtgcaatggtgctatcacaggtcactgcagccttgacctcccaggctcaagtgatccttctacctcaacctagctaattatttttattttttgtagagatggggtctccctatgttgcccaggctggtctcaaactcctgggctcaagtgatctgcttgccttggtcttccaaactgttgggattatagatgtaagtcaccgtgcctggcctcattttcttttctttgaggaatactaaactatttcctggtgaaatgacatcatgtctgtcagcttcaaaataatacagtgaagagaatggggaagtgggcagggttgccaacaaagcaagattccctgttgataactgttttaattattcttattttaaattaaattaaggccaggtgcggtgggctcaagcctgtaaccccagcacttcgggaggccgaggcgggtggatcgcctgcagtcaggagttcgagaccagcctggccaacatggtgaaaccccgtctcaactaaaaaaaatacaaaaattagctgggcgtggtggcgtgtgcttgtaatcccagctactcaggaggctgaggcaggagaatcacttgaacctgggaggcggaggctgcagagagctgagattgtgccactgtgctccagcctgggcaacagaatgagactccgtctcaaaaaaaaaaaatttaaattatatatattttttaagatacaggagtttcactatgtttcccaggctgaatttgagctcctgggctcaaggaatcctcccatctcagcatcctgaggtgtgataactgttgaagctgcttgatgggtaaacaggtgtattagtccagtctcacactgctatgaagaaatatccgagactgggtaatttataaagaaaggtttaattgactcagttctgcatgactgggtaaggcctcaggaaacttacgatcatgatggaaggcatctcttcacagggctgcaggagagcgaatgagtgcagagtgaagagtggaaaagccccttacaaaaccatcagatctcttgagaactcactcactatcacaagaacagcatgggggtaactgcacccatgattcaattacctcccaccaggtccctcccacaacacaaggggattatgggaactacaattcaagatgagatttgggtggggacacagccaaaccatatcaacaggttcattcattatactattattttaaaactttttgtatataaaccaaaacagccaggggtgagaacctcagagccagccacttagaaggacaagtgccacctcggcaactctgcgggcagaaccagcttggaggagaacaggtttgcaggaccctaaataagaggggagggctcagtctccaatgtcctgggccctgggcagcacagagccacttggggaaagaataactggcacttagagacgcaacttggggtttggaaggctctgcaagctgcttcactgtaagcccacacagcctctggagtccccatgtttcatgtactaggcctggaggccagactgagggtgccggctgactgaggcaaccaatgcaaacaatcagcttcttctctgtctccctgccctctcctgaccagcttcacagggattcagacccccatctcagttggcatcccccactgcccatcaccactgcttccctgcactgtcactcctcccatgggctcatctgctagtgccagggaacgttagcccagctgacttcttcggggatcggggaaggctgaacgcaaatctgtacaactgtgggcacccagacacccatcgacagagggagcaggagaagaccccagtggttgctgccagaactgtgtgagctgctgagagattccccggtagattgaccctacttgcacatcactccttcaatgaacaaatcaaatgaatcctaaatgctcaggtatctaccatcctggactagttgagtctcctcagccttggcccatggaccaacacaggaatgcccatgttctccacgtgctcctgagaaataatttcctgcaccactgaagtggatgcccccaccctgccgcacatctcagccctgtcctccacccatttccgctggtggcactactagctccggcctcctgctcagtttggggctctatctgtcttctgtgctccattaccttcccccatggcctctaggggctggggaggggagagttggaggggggctgcttaagagatttttggaatcagtgcctgcgcatcacccgctgccatgagttatttcagcgctgatgtttgtctcgagctgattattccagcccgagaacaggtggagcagcctgcggtggtttattcgtcagccaaggccatctgttcccaacaagctgagatttgtagctgatttctgctggggagcaaggagtaggggtggggagggagagggagatcacacccacaccccaggggacttgctcctcccagacctgccaggatgcctcaacccctgggcttcccttttactagggatcccacattttccaatttctcagagaaactcactggtcactcaagtcagcaacaatacttccctaaggggctacaccttcttagatggaaccatgtattagaagcacaaatctaccagccaggcacaaagtctggccactgagccatgtccccaccttgcagatcttaaaaaaaaaaaaaaaaaaaaagtatatcactatgacacaaatgtcctaaatgaccttctcaactcttggctcctcctcatcccaaccccactgccagtccctttaacaaaaacagcctcacctaaaccgatcacctgcagggctctcagctgcatgggagggcttgatctagatgctcttgtctcatctgcgctgctcgcctcccctaaataccctgttcatgttccaccctccaatctgttcctcttccagcttccctctcagccatgccgagagaagcctgctgctttaagaatggctttccctgagcaagggatctaagcagtttctaagcagctttgccacacggtttaccccctcccgcccacccgcctgctatgatttctgtatatgaaatgttgggaaagaagtgattcttataatcatgctaatatgacaatttggggccttctttggtgttgctacacacatctgtactgacttttaaaaattgtatgaaaacttggtattgaaagcacagccacttcatctataaccccacatccccaggtaaaactacttatagttttcagaggtcccttctaatatttatttattgatctgtgttttcccttctacttttgtcatgtctatatgtaacc

SEQ ID NO: 1425 - DNA, 2389 bp, Homo sapiens
gtgggaactgtagttccatgtgcgtgcgatgcactctatgggcccagctgtgctgctgtgttaacctggaggcatatcatttcaggaggccctgagtacctgcggtggggtgaggccagagtgagctccagctcagatgatcagggagaaggctgcaccagtctcattggattcttcacaccagctggtgctgaaggttcaggggttgaagttgaaagaagcctgtggggtcctccataaaggactcaaggtgctggccttccaacagcctggctctgtggctgtggggctgagtggcatcatggcggctcagaaagatctctgggacgccattgtgattggggcggggatccagggctgcttcactgcataccacctggccaaacacaggaagaggatcctcctgctggagcagttctttctaccacactcccgaggaagctcccatggacaaagccggataatccgaaaggcgtacctggaagacttttacacccggatgatgcatgagtgctatcagatatgggcccagctggagcacgaggctggaacccaattgcacaggcagactggattactgctgctgggaatgaaagagaatcaagaattaaagacaatccaggccaatctgtcgaggcagagggtagaacaccagtgtctttcatctgaggaactgaagcaacgtttcccaaatattcggttgcccaggggagaagtggggctcttggacaattccggaggagttatctatgcatataaggccctcagagccctgcaggatgcaattcgacagctaggaggcatagtgcgtgacggagagaaggtggtggagataaacccagggctactggtcacggtgaaaaccacctccaggagctaccaagctaagagcttggtcatcacagcaggtccttggaccaaccagctcctccgtcccctgggcattgagatgcctctccagaccctgcggatcaacgtgtgttactggcgagagatggttcctgggagctatggtgtgtcccaggcctttccgtgcttcctgtggctgggcttgtgtccccaccacatctacggactgcccacaggagagtacccagggctgatgaaggtcagctatcaccacggcaaccacgcagaccctgaggagcgggactgccccacagcacgcacagacatcggagacgtccagatcctgagcagctttgtcagagatcacttacctgatctgaagcccgagcctgctgtcattgagagctgcatgtacacgaatacccctgatgagcagttcattctcgatcgccacccaaagtatgacaacattgtcattggtgctggattctctgggcacgggttcaagctggcccctgtggtggggaagatcctgtatgaattaagcatgaaattaacaccatcttatgacttggcaccttttcgaatcagccgtttcccaagcctgggcaaagcccacctttgacctctggccagaagcctcccttctgtgcacaggagccagtttcacagatggagaagatgtctcagatgaagggagtgtccctgagatatcatccttttcttctgcctcgcctgaatcccccataaacaccagatgattgagtctaccttctttccttggcccgctccctttttcttctgcctcacttgaatcccccgtaaacaccagacgattgagtctaccttcttttcttggccacctccccattcacaactactttctcgctcccagaaggttgatcagatattctacaatcacagagtagcaaggacgtttgagatgggtatatcagtaagaagagggcacaagaactggctctggagaccaaagcagttgttaaaaattctctttgctgggggccgggtgtggtggctcacacctgtaatctcggcactttggggggctgagacaggcggatcacctgaggccaggaattcaagaccagcctggccaacatggtgaaaccctatctccactaaaaatacaaaattagctgggtgtggtggcgcatgcctgtaatcccagctacttgggagactgaggcaagagaatcacttgaacccgggaggtggaggtggcagtgagccgagattgcgccattgcactccagcctgggcaaaaagagtgagactctgtctcaaaaaaaaaacaaaacaaaaaaaacctctttgctggtatatttgaagagcttgggatggatttgactaaatctgccccgaggagggtgaacaaggtgatctcagagatcactactgctcttggagttccttctcctaaagctaaggccagcctccatcacaaatgcccataaaatctggctcgtctttgatgaacaataaatatttgttgaacaaataaataactgccctgcattaa

SEQ ID NO: 1426 - protein, 445 aa, Homo sapiens
MIREKAAPVSLDSSHQLVLKVQGLKLKEACGVLHKGLKVLAFQQPGSVAVGLSGIMAAQKDLWDAIVIGAGIQGCFTAYHLAKHRKRILLLEQFFLPHSRGSSHGQSRIIRKAYLEDFYTRMMHECYQIWAQLEHEAGTQLHRQTGLLLLGMKENQELKTIQANLSRQRVEHQCLSSEELKQRFPNIRLPRGEVGLLDNSGGVIYAYKALRALQDAIRQLGGIVRDGEKVVEINPGLLVTVKTTSRSYQAKSLVITAGPWTNQLLRPLGIEMPLQTLRINVCYWREMVPGSYGVSQAFPCFLWLGLCPHHIYGLPTGEYPGLMKVSYHHGNHADPEERDCPTARTDIGDVQILSSFVRDHLPDLKPEPAVIESCMYTNTPDEQFILDRHPKYDNIVIGAGFSGHGFKLAPVVGKILYELSMKLTPSYDLAPFRISRFPSLGKAHL

SEQ ID NO: 1427 - DNA, 2415 bp, Homo sapiens
tgagacaggaaggtggcaaaggaaggagcccatttgcatgacaataattgagccaagaatagaaagccacagggatgcaagggtgaggctggcggctgagctgggctaaacctcacaaatcagactacccagctctgctccgcaggggaagggagactgagccctgggccaggcttggcagagagggaagcgggaggacacgaccccagggcattgtgggaacactggccaggctggactttgccttcctcctcgtcctttagccgggagcctgtctttgcttgcctttgcctttgaggctctgtggctgtggggctgagtggcatcatggcggctcagaaagatctctgggacgccattgtgattggggcggggatccagggctgcttcactgcataccacctggccaaacacaggaagaggatcctcctgctggagcagttctttctaccacactcccgaggaagctcccatggacaaagccggataatccgaaaggcgtacctggaagacttttacacccggatgatgcatgagtgctatcagatatgggcccagctggagcacgaggctggaacccaattgcacaggcagactggattactgctgctgggaatgaaagagaatcaagaattaaagacaatccaggccaatctgtcgaggcagagggtagaacaccagtgtctttcatctgaggaactgaagcaacgtttcccaaatattcggttgcccaggggagaagtggggctcttggacaattccggaggagttatctatgcatataaggccctcagagccctgcaggatgcaattcgacagctaggaggcatagtgcgtgacggagagaaggtggtggagataaacccagggctactggtcacggtgaaaaccacctccaggagctaccaagctaagagcttggtcatcacagcaggtccttggaccaaccagctcctccgtcccctgggcattgagatgcctctccagaccctgcggatcaacgtgtgttactggcgagagatggttcctgggagctatggtgtgtcccaggcctttccgtgcttcctgtggctgggcttgtgtccccaccacatctacggactgcccacaggagagtacccagggctgatgaaggtcagctatcaccacggcaaccacgcagaccctgaggagcgggactgccccacagcacgcacagacatcggagacgtccagatcctgagcagctttgtcagagatcacttacctgatctgaagcccgagcctgctgtcattgagagctgcatgtacacgaatacccctgatgagcagttcattctcgatcgccacccaaagtatgacaacattgtcattggtgctggattctctgggcacgggttcaagctggcccctgtggtggggaagatcctgtatgaattaagcatgaaattaacaccatcttatgacttggcaccttttcgaatcagccgtttcccaagcctgggcaaagcccacctttgacctctggccagaagcctcccttctgtgcacaggagccagtttcacagatggagaagatgtctcagatgaagggagtgtccctgagatatcatccttttcttctgcctcgcctgaatcccccataaacaccagatgattgagtctaccttctttccttggcccgctccctttttcttctgcctcacttgaatcccccgtaaacaccagacgattgagtctaccttcttttcttggccacctccccattcacaactactttctcgctcccagaaggttgatcagatattctacaatcacagagtagcaaggacgtttgagatgggtatatcagtaagaagagggcacaagaactggctctggagaccaaagcagttgttaaaaattctctttgctgggggccgggtgtggtggctcacacctgtaatctcggcactttggggggctgagacaggcggatcacctgaggccaggaattcaagaccagcctggccaacatggtgaaaccctatctccactaaaaatacaaaattagctgggtgtggtggcgcatgcctgtaatcccagctacttgggagactgaggcaagagaatcacttgaacccgggaggtggaggtggcagtgagccgagattgcgccattgcactccagcctgggcaaaaagagtgagactctgtctcaaaaaaaaaacaaaacaaaaaaaacctctttgctggtatatttgaagagcttgggatggatttgactaaatctgccccgaggagggtgaacaaggtgatctcagagatcactactgctcttggagttccttctcctaaagctaaggccagcctccatcacaaatgcccataaaatctggctcgtctttgatgaacaataaatatttgttgaacaaataaataactgccctgcattaa

SEQ ID NO: 1428 - protein, 390 aa, Homo sapiens
MAAQKDLWDAIVIGAGIQGCFTAYHLAKHRKRILLLEQFFLPHSRGSSHGQSRIIRKAYLEDFYTRMMHECYQIWAQLEHEAGTQLHRQTGLLLLGMKENQELKTIQANLSRQRVEHQCLSSEELKQRFPNIRLPRGEVGLLDNSGGVIYAYKALRALQDAIRQLGGIVRDGEKVVEINPGLLVTVKTTSRSYQAKSLVITAGPWTNQLLRPLGIEMPLQTLRINVCYWREMVPGSYGVSQAFPCFLWLGLCPHHIYGLPTGEYPGLMKVSYHHGNHADPEERDCPTARTDIGDVQILSSFVRDHLPDLKPEPAVIESCMYTNTPDEQFILDRHPKYDNIVIGAGFSGHGFKLAPVVGKILYELSMKLTPSYDLAPFRISRFPSLGKAHL

SEQ ID NO: 1429 - DNA, 58010 bp, Mus musculus
  misc_feature (1)...(58010): n = A,T,C or G
cttcttttttctttctttcttttttttttttttcgagacagggtttctctgtatagctctggctgtcctggaactcactctgtagaccaggctggcctcgaactcagaaatccacctgcctctgcctcccaagtgctgggattaaaggcatgcgccaccacgcccggccagcttctttttcttttctctctctctctctctctctctctctcttaaagatttatttatttattatatgtaagtacactgtagctgtcttcagacacatcagaagagggggtcagatctcattacaggtggttgtgagccaccatgtggttgctgggatttgaactcaagaccttcagaagagcagtcagtgcccttaaccgctgagccatctctccagccccagcttctttttcttatgtctgctcttccttcctttcctgctagggactaaacccagggctttttaaatattaggcaagcattacactagggcctcccttactgacttgcccctcctacaaaagagtttaaataaatgtcaactaaaaaaatactatgagatgataatcaactatttgagcaaaaatttaaaggaggggacaggcagatgctgtctaaggaatcatattttaaaaagctctttttttttttttttgaggaggtttgagaagagacctcagtggcaccaggaacattcatccagccatgcaaactactcagctctttttctgttaaatcagctttgaggtgagaataaaaaaaagcagagtaaggcgagaaaaagggggagatgtttttttctctctctcttatttttttaaacctcaaaagtaagcctgagccttctttttggtggctggctgtgtttctaaaagcaatcaaccgatgttgaagggactggaatgcaaaatcatttctaatcctcttctagccctatacttttcttggtgtcatcactatgtaacaggcatgccagcctgctgttaacagaacttgttgcctgccagtttttctctattaggaacatttattatcatcatgggatcttctttggttggcttaattgaggtataatttacatgtaataaaattcaccagttttcaatgtttaattctctgacaaatagatgtggcatccacccaccaccacaatcaacaaatcaagcaaatagttccatgttgtggcatctcctctgtgatggtttgcatatgcttggcccagggagtgcactacttggaggtgtggccttgttggaatagatgtggccttgttagaggaagtgtgtcattgtggtcattggctttaagaccctcactctagctgcctggaagccagtcttctcctagctgccttcagaacaagaggtggaactctcagctcctccagcccatgtgtgcctggaagctgccatgctcccaccttgatgataatggactgaacctccgaacctgtaagccagccccaattaaatgttgtccttctaagagttatcttggtcatggtgtctgtgtagagcagtaaaaccctaactctacctctttgaagtcaatcacttttacccacctgcaacctgtgacagttgctcaattgtttcctgcaaaagataactgttttgctttattttattttattttattttatgttttaaagacagggtctttttttatttatttatttatttatttatttatttatttattttggtttttcgagacagggtttctctgtatagccctggctgtcctggaactcactctgtagaccagggtggcctcgaactcagaaatccgcctgcctctgcctcccaggtgctgggattaaaggcgtgcgccaccacgcccggcacagggtcttaatatgtagccctggctatcctgaaatttactatgtagaccagactggcctgcaactcacagagatcctgttatctctggttctgaaatgatgggcttaaaggtgtgcaccactacacccaactcaaaagataactcttaatatgaaacaaattcttagaaggactttctgcttggaaattcttgactaagatacttcattgaatacaaagatacatggaaatcagtacatgtccgtaagtagccaaaaatctcgttgacttttatgtaatttttgagattacgctgcttatatataatgcaaggctgaattttagaatgaattatgcccactaaagaagaataatggacagagaccatatctgctcctgaactcgataagaccaagcaaagtcttgtactgtcaggaacactacttatgatttctgtaaaaaggcacagacttatgaccaaggatgtttcaggtattttttttttgtaataaacttttaaaaatcaaacaaaatatattaaggcagaacaagtacaaaacctatcggtgcaccctgcgatggctttaggttattagatgccaacgtggaccagttagtttaatggccaacccaccaaaaagacaacactctaaagtcttctggtttcctccttgtaggaaagtaggagagaacataatgaggccctgtgaaggctcacagagcactgtggggagaagttgtgagaaaatggatggcacattaaaattcatgagatgccagttaagatctctgaataacaaagtgattattattattcaaggtcaggcttttctttcatctttctataaagacacaaaatcattaccatgatctgtcacgtgtgtctcctttgttattagatgctggacgggcttattaaacggtctgtattccctggaggggaatggccccagtggccgggaatgatcacagttccgtggctttgtacggttctaatcgtgagtgcatttaaaccagaggaaggaaaagcgaagctgaagggaacacagaacggcagggtaggcattttcttgtgatgacaaagaaatgaatcctttcttaatttcactgactcttgcatatgctttacaccagccatttccagaatgcacagcagataccgtgtgtgaactctccttggtcaatacagtggggaccacagttaatttcaaaagggaagcaatatatgcaaattgagaaagagtattaacatcaggaggagaaaagcaggaacaataacctggtaaaaatgtgtatggcagagtctaacttagtaaagtgcttgcaagaccagagcgagtgtctctgaacccatgtgaaaatatacagctgcatgggtcggtgccatggttggtagaggcagacatgccctatggctcaaatttggtgagttcttgggtagtgagtgcctaaggaaagacacagaggctgtccctaggttctacatgtatgcacacaaatgtgcacagggacacacccagtaaaaggactctagcaggcctgagcatggcaaacatggctctggcagccctttcccttgttttctctgcctcactaaaatccattagattacattcctaaagcaagcaaccaaggtttattcccttatttggctacttcctcctctgagggagaaaggtccagctcctacaaggagtaggacctttcaaatacttatcaaagtattgaagtccaacaatcaaaagccccctttggctcacctaattaacatgaccaattaaacacctccttccaacaacggagtgggcgggagtatccctaaagttgttgctagtctgtggaatatgttcccctaactgggttgccttgtctggcctcagtgggagaggatgtgcctagctctgcagtgacttcatgtgctagggtggaggggatgtccagggttggggtgggggctctgccctctcagaggcgaaggggagggaggagggacagtgtgaggggagactgggagaggtagggcagcgataaggatgtaaagtgaatttttaaaaagtgacaaaaaaaatgaaaagtaaaaagaaagaaaaaaagaaaaagaaaaaaataacacctcatcctaacattggggttccccttttgcctttataaatttccattttcctatgggccacatctatcttctctccatctagaagcagttctgcattatcctgtccccccaactccctggtacaaatactccttccccctctccctgtccccttctccttcttcctcatcctctattccctgcctttgtcttttattccctcctctttccccctctggagcagctaagtctcctctgtgctgagagtcatatgatgccttaacttggatccaggctcactcacgtttgtgtatagtggctcagaaacttacccacattgtaattctaatatgcaaagaaattactgcttttttaaattttcttagatggacctccttttacttgcatgctcctgccttgctccataatgagaagggaaaacaattatgcccagcaaccctttttagttcaaataagtagttcgttctttctgagggctacatttccttttaagggtggagcgtttacatttccttccttagccctcctctagttcaaaatcatgtccagttgtttagaagaattgtgacctaatgatgctgaggagagaggagtcaaaaacatgtagaatctcagagtcagagtacacagagtagcatgtgtgtggcctggtggtccttagtgggtcctctgaagtgacattattaaaacaagattctgccatcctcagacacccacactcatgtcatgttcatatacccacacacagagatacacacatgtgcataagtaaagataaaattaaagaatctatcaaatgatgaaactattttgtactttggaatttttttatttgtgtatttgaatatatatgtgcgtatacacatgctaccaaaggtatggatgtcatgggacaacctgagacctgagacactgtcttcttttactatgtgggtttcaggaatagaactcaggtcactgggcttggtggcagatgcctttacctgctgagctatctaggcagcttctgttttatatcttattgatgacccttggtcatataactaaatatacatgacacaattcacaaaattacccactagaattatatttgcaaattatatctcttctctctcttgttctctctctctctctctccctccctccctccctccttctttctctttctttctttctctctctttctttctttctttctttctttcttcctttctttcacctttgtgtaaccttggctgtcctggaactcactctgtagaccaggctggccttgaattcagagccacctgactttgtctcccaagtgctgggattaaaggcttgagccaccactccctgactgcaatatctttaattaatgaagaggtaaataatatatcttactaaccctgaccattcactaaaagacttttaacaatgctcagcatagccgggcgtggtggcacacgcctttaatcccagcactcgggaggcaggggcaggcggatttctgagtttgaggccagcctggtctacaaagtgagttccaggacagccagggctacacagagaaaccctgtctcaaaacaaacaaacaaacaaaaaaaacaaacaaacaaaaaacaaaacaaacaaacaaaaaaaccaatgctcagcacagattttaatggtagcacttatgcttgtcagctctcttttttctcctataatgaaatggtattacaatggaaaagccaaaaaggacaatactaataaaaatattacaatggaaagcagtgagttgcactacaaaatatgcctatattaaatacgtataaaatttaaacaatattgggcttggtagtccatgcccttaattctagcactcaggaggcagaggcaggcagatctctgtgagttcaaagccagtctggtctacataatgagtttcaggaaaggctggagtacctagttagaccttatctcaaaacaaactttttaaaaatgattacttatgtttcgattcttttcactttttgatttgtaataattgaaaggtgcttagttctagagaaatagtactgcttaatttttcttttaaataatgttgacactgaagtttctcaaattaacccagcttgccaccttcaggcaactgcaagatttacagagacagagctagagatgggatattaatttttcatctttctcaaaaaccttaattagtagttttgtgatctagtagtacctttgtattttgctctgtcttgaagctttccctagaattcattggaaccttctagactctcaaggcttagttcatttgttgctagctacaaaaagcttccccaccctgactcaccctgtagctctattgtgttcctcagagtgtcttctagatactatgtattctctacacaaccaccacatgcaagcgagccaccttactgaccccttgattacttttaaatgagaagaatacatctgaggacaccttattttcttgaatcctttccactggatcttttccaacaacattgaacattcctgtgctagcccactttgtcctttctcccaatccttgcttcattacatctcccttctctctgctttctcccaagacctggctgcttctatcaaagagaagtaagctagcacaggaggctctagtttggccctttgctcaggagtatcttggatctttgtttttgccttggtgagagttgggaaggaaggcttcactgtaccaggcaaatctaaaaggaaaaggaaaacacagaggaccagactgatatttaaggattgaaatttgacccaaatgtaaatgtataatactaatcttaatgagccttgaattgtgaccacttcaatgcctgtattacacaatgatcctaaacatgttcagttatgcaccaaataatttcattgacaagttttgctttttgagtcagggtctcactatgtagccccatgggcttggaacttcaagtgtagaccaggctggccccaaactcacagtgatcctcctccctctgcatccaagagatgagatcaaaggtgtgcaccactatggcctgtcccagccttttccatcacatcccctgagtcagggtgtctttaccatctgttctcaatcttcctttcacttgccttcatccatttgaaccagtgactgacaagcccatcaaatacattctcagtttgtgttgtgatacctccccttctccgtacagtacggattctgtctgcttttctttatgtgaccaaaacaattcttatttaatcagattagtgatagtactgttcagtctttctatgagccataagccatcatgttctgttcttgggtctctgacattattatgtgtctagtgtttgggactctgcttgttattatgtaaacaacatatgatatttttgcttcatgtattggttttacttcacaatattttattattgtgtatgtgagtgtgtacagtgtgtatatgggtggggtggtgggtaacacatgctgcacaatgcaatccagtgggtaataattgaagggccctttaaccatcacttcaggggccctatattttgctttctttttttttttttttttattaggtatttagctcatttacatttccaatgctataccaaaagtcccccttacccacccaccatattttgctttctttttcaatggcgatgtaatcacattatttcatcattttgaaagtctttacagttgagcccttgatgctcggaaatagattgcatggaaccaagaacatttggaagactgctcattgaagcaacagcagcaaggtgcaatccacacttcttaacctttgcttatcacttgtactctttctcctgactcagaggtaacgagacatagattcaatgttggggatgcttaccattcttccaaaattcagcccacacattttccacttttactccgtgtttgtattctatttgttattgtaatttgtaagatcattggtctagaaatactaggaatatccctatgtcattaatagtaaaatagtctacatggccaaggttgggaaaaccttggttggatggtgctaccatctaggctccttgactttgttttctttaattcgtggcttccagttttattctggatattttgctaggtggttatcaacaaatggagtcaactctaagagttacaaccactgaaagacactcctcatttaaataattccacttctcattccagtattaggttagtatgattgtgaggtttcttatctctctctttttcatcaccaagaggaagtttcagaaatttctttctcacacgtgaaaaccagagaatattaacctttaatcccatatccctggacaggcaaacttctgggagctcaaagctaacctgatctacttaatgagtttcaggccatctagggctatatagtgatatatagtgagactttgtccaaaactgtatatatcaaatacttaatcatttaaatacaaattgcttagtaaatggtcacaattcctgatttgaaatgattctgcttattttcttagaaagtgactttgtgaaatagctggtctgttgctcagttacagaggtcaccaatatcttcatggtctgactacaattgtatattttgatctcttctgacataatagtttgaattactaatagaaatcgaaaggttcagagatggttttaatgttttggagaaatctaaaatgttctcctgtcactagggctattgcctcagccgttagaaagttacacctgacttgctatcattcaaattctgataaacttgcattaaaggagttgttgatcagttacgttgaaaaggagttgatacatgtacgttttaaagcaaagtcttggattcttgtaacatcttacatcttttctagtttggtcttgggttgataagtgaatggtagttttatgttgccttcctataaaccatgattaattttaacagcaggaactactgaaaagtgcaagaagcaaatggacaaggtcacatatatctgtaatttagcacttgggtagctgaggctggaagatcatgagttctagggtatcctgggctacatagtgatttaagtgtaagaagcaggtttcttcacattttttcataattaactcaactcagaaaatcagctggcattatcactgaaggactagtccaagaacccccctctttccctccctcccttttcccctcttccttccctccctccctccttccttctcttttcctctcccttctttctccctctcccctttattcatctcctcttctgagacagagtctcattctcagaattatcctggtggtaacccggaactcacagcaactcttttgcctctgcctcgcaagtgttaggaccacactcagctttgataaagtactgggtattgaatcccagggtctctcatatcgtagataagtattctaccactgaactgtacaccaagtccccaacatacctttaaaaataagtaaaccacaccacctcagataatgtgtatctgtagaattttcagcagttgtgttttctaaggaacgtacttccactaaaagtcaacttattttaaaacagatgttaaccctgtctcgaaaaaaacaaaaaaaatcaaccaacaacccagatgttattcattcatctatcctcaacaaaccctattgtccacctcaaatcactgctccctgctgggtgtacaatatatagtgttccggaagtctggatcatgtgtgtcttcccagcttcttggagggtatggaaaatatgcaaataaatgtaaatgaagggttccatgaaggaagtgaaacagcatgggaatctaagttttgaaaactacagaactacaagttggaccgcactatgtgtcttgataggacgatagggaagtgagttgcccaaggtcacactgtaggatggcttcggctcctgggaaagggtcattcaactggtatctggagataggcaagacttgtggggatgctgtggcgactaagggccacactggacaaactgtgacctggccctcaggtgttcaggtgtgacttcgcgggtggcggaggcacgtggcggtgggcgggactccttgggggtggtgcctcggggcccccaggagcgcgggcccgtgcgcgtccaagcagaggccgccacgtcatcgagccgctcccccacccctctcagccagtcgcacgcgcggaagtaaacacccctacgtcatcagggcgcgtcctcgcctttcccctcccatctcctcggctccgtggacgtgttcgcttcttctccggaccgggtctatgtcccggtttcccgccgtcgcgggcagggcgccaaggcggcaggaggaaggcgagcggccaatagagctccaggaagagcggccgtcagctgttcgcatcgctgacagaggtacggtccgcgggacgctgtggcacccggagggagttatttgcggggcgaaaagtacatctgtgggcggcagaggaggtgggaagggagcttagacgttcttttggtcttttaagccagacgacgaactttgcgtccagtgagcactttggcttagaagggggcggtcccaaacccaagttgggtgagaacctctctggggggcaagaaagtggacccgaacgcccaaatgccttctgctgttctacagcctcataaagcctttgttctctacccgttcatccccctccccttcgtcgggccgccagcctgcctttgggtacggtatgaagggagcccgtttccaggagccagtttccatggttacccaccacttggccttctgggatatcagtcactctgaacagggacctaacttgaactgtgaatcagaagcaaatacaggtggcttcttcttcttctcagagttgttctgctgtgctcaggttgttgatctattgtttaataaaattgagtttagtttttccaggtaggtatgcatacatacacgttgtcttgtgcttgactgactttgtcaagtacggcgagttacacatcaacaatgttgaagttgtttgattttaccaaaaaaagttattctgagtttataaactttcacgtgtgatttgtacatggttgacgtaactgaaaagtcatagattgatctttcccgttgtgcgattcctgtgcattcttctttcaggtctgagccattgtcagagagctcttctcaggtgttttcattgcacaattgtttttgtgttgttacagaagagaaaggatgcacatcacaggagggaggaacaactccaacgtttcctattcagaaacaaagaaaaaagctcattcaagctgtgagggacaactcgttcctcatcgttactggaaatacaggaagtggtaaaacaactcaactccctaaatacctttatgaagcaggtaattttattcttggataaagctggaagcactaaagagagaaattctttaaattttaatgaaagtactgtagtgtgcaaatgcccattgctgcgttgctttgtgatccttagcctccctatgtctccttggctttctggatttatttcaggctctggaattgttggggtgacgtattaaactacaatgataataataataataatagaagaagaagaagaagaaggctgattgtggtggtgcacacttttaatcccagcacttggtaggcagagtcaggagcatctctgagttgtaaggctagcatggtttacataataagttccaggccagctatggttatatgataagaaggaaaaataaaaggatgttaattttctcttttaggataaggttatctcattagccagtgagaactgaaacaattgtgaattggaaaggatagttgacctctgttggggacatatttttgttgggggggtgttggtttttttttttttgagacagggtttctcagtgtagccctagaactcactctgtagaccaggctggcctggaactcagagatgcacctgcctctgcctcttgagtgctgggattaaaggtgtgtgccaccactactttgctgttgctgacaatttattcttcctctagaccgttatcagacaaatattctcagattctaccagaattgagcaaacaaattaccaataaagtgtctcatcagtgtggcaacattctctttcataattttggaaaagagaaaattatatattactcatattaaaataaaagttaatttggggggtactagagagatggctcagcagatgtaaactcttgctgctgcttcagaagaccagatttttgttcccagcacctatattggcggttcacaaccacctataactctagtttgggggattccgataccctcctctggactcctagggacctgaatgtgcacattcaaagacagagatatatatacactatacataaataaaaacatatcctttgaatttttaagtctttttctttttttccaagacaaggtttctctgtgtagccctggctgtcttggaactaagagagccacttgcccgtgactcctgagttctgtgattaaaggtgtatgttaccattgctgggaatttttttttttttttttttttttgagaatggcctacgtatgctgtttgagctagcctccatcacgcctgccctcacagtaacctaatcggatgcatctgtcctaattcaacatcgcctgctaaggcgtgctgtcattttacatgccagtaagaaagcaagtgctaccaacggtacaatacatctccattttcggggatgttaaaatggttacaatgtttacaaaaatttatgcaaaagtggtatttttaaatccagttttattctgtggcaaagaaaagtttaggaagtgtgtggagtttttttgtattttggttttaccgtacttatgccatagtactagctacttgtgaggcagaagatatgtagggtccaggagtctgaagccagtatggtagactaatgagatcttgtaaaacagaccaaccaaacttatagaatccttgacttattgtttaaatgctttaaaaaaataaaaacctcaaacctaattaacatgtatatttaaattggctctggtttatgttttaaaacttcctttcatatgctatctatatatgtgtttaggcacatgtgggacacagtgtgcatgtagaggtcagaggataactttagggagtcagttctctcctgccagtgtagggtctggagtggaactcaggtatcagggaagcatctttacctctgagctgtttcgtctgtgaatgtgcattcctgttttaaattaatagtaagaatgtttatgcaaatgtactgcagtatgttgctgatcttgtagggttttcttttgaaaacataccatttgcatcgattgaccaggaacagtttttaattttagttcagtcggaagaaagaattgctaactctgctttgtgtttatatttctggttttaatagggttttcacaacatggtatgattggtgtgactcagccacgaaaagtagccgccatatcagttgctcagagggttgctgaggaaatgaaatgcactttgggatctaaagtaggataccaagttcgttttgatgattgcagctccaaggtataaaaatttactagtatacatttaaagtactaaaaacacacactccagcccttctgtgtgtctttctgtgatggtgtatatacacgtatgtgttgaggccagaggatgacttcgagtgttatcctccgagtgccatgtatgtgatttatcgtttgcttttgtttttgagataaggtctatcactggcctagaactcctcaagtaggctagctccttcattaaaagaaaaaaaagatattaaggcgttgggggaacaggacatggcctggggaggtagctcagttggtaaagtacctgcctggcaagcatgaggtcctgagtgcaatccccagaatccacataggacagtttagtttgtttgtgtgttttgttttgttttgtttttactttttatgaacataaatgttttgcctgccagtgtctttgtataccatccatggtacccaaggagtttagaaaaggatcccagataccttagaactggaagtacagatggttgtaagctaccaaccatataggtgctgggaaccgaatccttgtcctctggaaaaaagcagcaaatgttcttaaccaagcactaaggcatctctctagcccctaggattaatttttttctttcatattgttaaggccttgtcttaggtatctgactttattttatttatttatttatttatttatttatttattttggtttttccagatagggtttctctgtatagctctggctgttctggaactcactctgtagaccaggctggcctcaaactcagaaatccacctgcctctgcctcccaagtgctgggattaaagggattgcactactgcccgtctaggtatctgactcttatttcccatcctcaactagtttatctgttatcagatgtttgtcttagttagggttttaccgctgtggacagacaccatgactgaggcaactcttttaaaggacaatatttaattggggctggcttatattttcagaggttcggtccattatcatcagaatgagatcatggcagcatccaggcacacatgatgcaggaggagctgagagttcctcttcttgttcagaaggcagctagaagactgacttccagggagctagaatgagggtcttaaagcccatatgcagctgggcagtggtggcgcacgcctttaatcccagcacttgggaggcagaggcaggtggatttctgagttcaaggccagcctcgtctacagagtgagttctaggacagccagggctattcaaggggaaaaaaaaaaaaaaaagcccatgcccacagtcactttttagtcactccaaaaagttcacacctccaaatagtaccactccttgggccagacatattcaaaccatgacagtgttaatgtttatttttcttagagtatgttttgtttgtttgtttttaaatcataggttccttgacatgttggttagattttttttaaaaaaatgatttattactaggggctggagagatggctggatagttaagagtacttgttactcttttactctttttttgggggggggggggctcgagacagggtttctctgtgtagccctggctatcctggaattcactttgtagaccaggctggcctcgaactcagagatccacctgcctctacctcctgagtgctgggattaaaggtgtgcgccatcacacccggcacttgttactcttgcaaaagacctgggttcaattcccaacattcatataatggctcataacctccatgacctcagtttctgggcacccagcagacacacatggtgcacatacacttatatgaacaaaatattcatgcacagaaagtaaatagattttaaaaatccattttatgtatggctatttttgtctccatgtatgtctatgtaccacatgcattcctggtgcctgagaaagccagaaaaggacattggatttcctaggattggagtaatagttggttataaatttccatgtgggtgcagggaaccaaaataggcccctctgcagcaagtgttctcagtggttcatctctgcaacctcagtgctggttgcattcatatttaaactttgttttgttgtaataaaatgtacataatgtaaactttaccattttaaccattttaagtgtgcaattcaataccatcagatatagtcacagtttacagtgttgtgtaactatcacagtttcagaacttttaatttaaaaatctcgaacagaaactgtgtattcagtccttgtaggtgtctgacctctctctatgaagatgcctagtcaaagcatccaagtggtatgacacagtatttttaccttgtgtcctttgcatcacacttagctgttttcagagtctatccagtgtattagtttggttttctttactgtgataaaacaccaaccaaaattaacttgggaaggaaagagtttatttgtcttactaggttacagaacatctttaagggaaaccaaggcagaaacctaaatgtaggaaaagaagcagaggccagagtggtgttgactagattgctttccaaggcttcctcagtttgctttctcatagaactacctaggactaaatgtcccaggagggtactcttcacatcaatcattaatcaagaaaatgcccacagacatgcccagaggctgatctttgaagacagttgcctatttgaggatcctacttcccaggtgactgtagttcatatcaagttgacaaaaactagccagcatagtcaatgttgtatcatagtgttcttaaagtcagtggataacttgacaaattaataacaaagtcagtgaagtttttaattttagtttgtttgccatgccccaaatagaacctagggcctgtgcatactagagaatgcaagcactctgccactgaagtatccctgttatcttatgtgtaagtatttatcttgctacattccaggaacttctttgtatcttcttattggcaatttgttctatctcaggacactctcttagttcctttctatataagtgacatgttttatagttaaccatccatccttattatatacagttttatgttctcctttatgtagctcttggtgatttgacctttgcacttggggtagagaattagttgaatcatggtgaagtttgtgatgctacaagttgatgtcctctgcttttacacattaggaaacagcaatcaaatacatgactgatggatgtttactcaaacatattttgggagatccaaatcttagcaaattcagtgtcattattttggatgaagcccatgaaagaactttaactacagtgagtattttatttatttttaatcaatgagaagattcatttgtttgaggtagctttttcctgtatggagaaatgccttctcttacattttaatctgtagaaattctttggttataatagcagtctattttaaataggtcagagctggcatggtggcacacacctttaaccccagcattcaggaagcagaggttggcagatctcttttaagagtttgaagccagtgaatatagaggagttccaggccagccccatgctatatagtgagaccttttctcaacaaacaaaatagcttacatggacttactagggatgtagctaagttggtagagtgcctgtatagcatgtacaaagccctgagtatgatcctcaacatcacagagatggtgatgtggcaatacactcctttaattccagtattcttgaagtggaagcaggaggattagaagttcaaggttctccttgactgcatattagtttcaggccagccctaggctacttgaaactgtctcaaaaataaatattcctagtactcaggaaacagaagtaggctgatctctgtaagttgagggccagcctggtttacttagtgagttctaagccaaactgttataaatagtgagatcaggcttcaaagatagatagatagatagatagatagatagatagatagatagatagatagatagatcaggcttcatagatagatagatagatagatagatagatagatagatagatagtcaggcttcaaagatagatagatagatagatagatagatagaggcttcaaagatagatagatagatagatatatagatagatagaggcttcaaagatagatagatagataggctcaaagatagatagatagatagatagatagatcaggcttcaaagatagatagatagataggctcaaagatagatagatagatagatagatagatagatagatcaggcttcaaagatagatagatagatagatagatagatagatagataggcttcaaagatagatagatagatagatagatcaaagatagatagatagaggcttcaaagatagatagatagatagatagataggcttcaaagatagataaatagatagataggcttcaaagatagatagatagatagaggcttcaaagatagatagatagtcaggcttcaaagatagatagataggcttcaaagatagatagatagatagatagatagatagatagatagatagatagatagatcgatcaaagatagatagatcaaataaaaaatacaattctagcatttgtgacttactggcttttcttttcaggatatcttatttggtttactgaagaagctgtttcaggataagtctcctaacaggaaagagcatttaaaggtggtagtgatgtcagcaactatggaactagccaagctctctgcattctttggaaattgccccatatttgatatacctggaagactctatccagtcagagagaaattctgcaatttgatcggaccacgagacagagaaaatactgcatatattcaagcggtattactttgcaatcttcttttatcttttgtgtgtgagatttcatttacttggataatttggtaatttatcttgtttttataaatttcatttattatagtgtatgtataatgtgttgggggatgttcacatatgccatggcatgatatgaaaggtcagatgacaactctgtagcctttgttgtctccatctacctttatatgggttctagagattaaactcaggtaatccatcaagcttgtgtggcaaggtccttaccagtgagccacctggctgcccttactgcatctaatcagtagccttaatgaatgctaggacttcttgggagcctgactgaatttttttgtgtggagcaagggaatatggtagttaaggaacaagtatgctatacctgcatatcatttttgtgtttttttgtttgtttgctttagattgtgaaagtgaccatggatattcatttgaatgaaatggctggagacatcttagtttttctgactggtgagcattccctactatgtttaataatgtctcttatttgtaagccagatgtagtcattgatgctgctaacattagaactctggaacgtgaggcaggagaattactgcaagttctaggattgatagcggtatgtagttcaagattagcctgggctatatgataagaccctgttcaaaaacaagaaggaacaacaacaaatagcctcaatagatcagtaaataaataagtaaataaaacgattttgtgttttttgaaacaaggtctttcttgatatattgcccatactgttctgagagaacaagaacacaccactgcttggttaatgtcttccttttgtatgcaggaaatatggcaccagagtaggctgctacttctcctaggatgtgtggactctgttcagctgttgccttatctttttatgattctctattagataacaggtacacagaatgtcaggatcaccaataagcacatgggaaccacattgccctgtcacagaaagtaacactgcaaagtggggtggtgtttgtttgtttgtttgtttgtttgttttggtcttgcctattgcacacagagttcaaatttggctaaataaacctggttctaaataattctgttattcaaatggcatcccaactgtgatgtcttgaagtgctaagatggtagtattgataaggtgtgggatccatgcattacagacaagcttgaagaagctttgggggggtcaaacatagaagagttacattcaagagtagtgaacctttgtaattagctgcttccgagcagggtgaatcatttcattgttgagtctggagtgagacatttaaactatgtctttgccttttggaagttatattcaagtttttgaattgtacctagattcagtatttcttgtactagtttactttgtgtgtgagtaattctgtcctcctgaaacttggtattaacagcatgaaaggcttgaagatgataaacacttttgtttgtttagaagtcagaaacatctgcttaaactttgttgttgaggttgggcatatcctgcatgcttcttttctccttttagatcaaaagaatgatttagaataaccttaaactaattttaaactggactttaatctttaagatttgcagttcaattccccaagttttctaacttctcctttcaggccagtttgagatagagaagagttgcgagctgctctttcagatggcggagtctgttgactatgattatgatgtacaagataccacgctagatggcttgttgattctgccatgttacggctctatgacaacaggtaaaattccttactaggaaagaaaacatgactggccagtaaagagttttttaaatgattttttttttaaattcatatattcctgtgtgtgtcagtgtgaatatgtatacaagcttctggggggccagccaggctagcaggggtaccttgcatacattagcatagtaattgtagttgtagtctggagtgagacatttaaattgcttaatacaggtgttgggaaccaaactcgggtccattcaagagcaacaagagattgaccactgagttatctctccaaccccctctaaaaatgtttttattgaattactgtgtgtattcagaaaaatatatagtgtttggatcaaaaaatttcacaaactgatctcagttttgtaacttccaggccttaacccaaatcatgaaatagaaccatcatcccttgagaaaactgattttgtttaagatcctttcatggtaacttttgagaaccttgaatctccttcttagtattttaagatggattgggctggtgaaatggctcagtgggtaagaacactgactgctcttccaaaggtactgagttcaaatcccagcaaccacatggtggcttacaaccacccataatgagatctgatgccctcttctagtgcatttgaagacagctacagtgaacttataataataaataaatctgggggccggagcaagtggggttggccagagtaagcagaggtcctaaattcaattcccaataatcacatgaagtttcacaaccatctgtacaactacagtgtgtactcatatacataaaataaataaatcttttaaaaaaatagagtggatgtgctctctcaacagaacaaaattacttgtggggagattctttgaagtgaggactgtaatctctcaatatttatagaaacctggatatgtctcatattaagcagtgtgaactttctttccctgtgatcatctagttgggatatgtgtgtatgttcaaagaggatgcacaaacttagtacttggctataataaatactattggatgatagaatttgttctgtaaaacttcttttttattggattagacttataaaattaaaaggatgttgtgactggagagatggcttagtggttaagagcactgactgcttttccaagcaatacatggtggctcacgactgttatgtagctccaattctagagaatcaaagcctgcgtctggcctccttggggactgaacacatgaggtacacaaatatacatgcaagcaaagcacctatacacataaaaatagtaataataaatttttaattaaatgactaaaaagatattaaccagaggctgttgtagtttgattaaattagcagttagccacagaccagatgttatttttgaaatcttttgtgatagtaggtacttgataatagattagtgttctccattttatatcttaaaggcatttctctctctttcgtccttccttccttccttccttccttccttccttccttccttccttccttcctcttttgttttttttgttttgttttttttgagataagatgaacctgtgtggccctggctgtcctggaacttgctttatagactaggctgacctagaactcctgagtgctgggattaaaggagtgtgccactacagccaggcttacaggcaattcttaaggttctcattgttatctggacttaaataacttttttgtgactagtaaattcagagtccatggtaaagagacaatgtggtgtgcacctgatccctgtcactgctcttttcctgaggctgttgctagcccttcttccccagctgtgctttcctcagtgaaatgagactgtttcttaaggcttgcactttaactttctgtttccttaacagtctttgttttagagaggtcttagacttgactgactcttgagagtcttccagtcctttcttgttcctgagcttatatctcttgggtctttttttttttttttcttccaagacagggtttctctgtgtagccctggctgtcctggaactcactctgtagaccaggctggccttgaactcagaaatccacctgcctctgcctcctgagtgatgagattaaaggcatgcgccaccactgcccagcaaatgacagttcagatggctgtgagccactaagcagtagctgggatttgaaccagggtctttggacctgcagttggtgttcttgcccactgagccagggctctggcacctcttggggtcttgtaaatcaactttatgacatgtgcatttattatcccagatcttccaacccaaggcggccaccaccacacttggctcttcaccatgggttctgaatttattagtattaaaaagttatttaggtccagaaaacttacagcagaggagttcttttacctaatcatttttttcttttttaaccattgctagagttgggatctctctctctctttctctctctctctctctctctctctgtcctgtgtgtgtgtgtgtgtgtgtgagagagagagagagagagagagagggagagagagagagagagagagtgagttgagttgagttgttctgtgctctgctaattcattttccaggacttactttgccatccagctgcagtggtaaccatcctttccaaaagcatacttgtggtcccaccatgactgcgtgatataatcatctttatttctaagcctaattttctgtgttcatgtatgtatctgtgtgatggagttgtatgactgagtgtggatataactatctttagaggttttgggttaatttttcttttgagtactaccataggtaagctattgctgatctattatgagaataataattgttatagtagtttgagcagtgcaaagaggccttgaggtgaaactgatgaagtattgagtaaagtgctgggaggttaggtaagggggagagaccccagattcctgggatctgcccctcctttaaagatttttcttaaagatttatttttatttttaattatgaatatgtccctgtgtgggtgtgtgtacattattgatggtgctgcaaaggcattgtgtccacctagactattagttacaagcagttcattgtgagctgtcagatatgggtgcttgggagaagagtatgtgttctcataacatgctccatctctgcacccatggaatttttcgttgggtttctgcaccactgcacctcttttctgtattgttgtttctgtgggtattggggacacttttttaaccttacctttttgcattgttgtcatggtttggtgacataaaagtttcacttgagtgtaaggaaatggagaagtgtttcttggttgtggtttatagaaaagattttttacactgacccatagctgggttgatgaataggtaaaacaaataagaggctattgtgagacaggatcttactgtgtggcctaggctggtcttgagcttgggatccttctgacaatctcctgagtactggatttccagtgtagaaaatcacatggggctcaaggcagatactttctatccactctttttttctgcattagctatgatattgtttattaaatgaacatcttaaaatgtcctcccagttgagacatctaatattcttgtctgtcaaatgtggacaggtgctatgcagtcccttctaagattacataaactggctctttgtcctggaccgtgcctagcaaccatttattaccttactgtaggagatgtttttataattatgtataaatatatgtgtgtctgtgtgggtgtgtgcaagtgtgaagcaggtgcatgagaagtccagaggagggtgtcaggtcctttgagctggagccacaggctcttgtgagccatcccacatggactctgggaactgacatggctgctgggatccaagatggggtcctccacaagagcagtaagttctcttattcttaacctctaagacatctctccagctggatatgaaaatttttaaagtgaaacagttttagtttttgtcattacagtttatagtatagattatttaagaggtgataaactaggtataatggcacacacctttaaatccagcactcagcaggcagcctgatctatatggagagttccaggacagcaggacagccaagggtactcaggaaagagaaagaaaaagtgtgtgtgtggggggggggggggattgtaggggtggggagagatggagatggaggaggggtgagagggagatgaaaatacaacttgtaatgaaaagaaatgggttcttttaagcttgatgtccacaagagcatgatgttttaaaacctttttctcccctctgtatatatttttagatcaacagaggagaatatttttgccacctcctcctggaattagaaaatgtgttatatccaccaatatttctgcaacgtctttgacaatagatgggatcaggtacaacttttaaaagtcttttatttgtttgtatgtgtgctagcagaggtcagatgacagcttgagggtgttggagtttgtcttccaccatgtgggctctagaattgaagccaggtggccagactttgatacaagtgcctttacccactgagctgtcttgttggctcaggtttaacaacttttgtaagttttctaaaagtaaggtaatcatttggttagtcgtacatcattacaggctttgcaaacccatgttcttcactaactcccttgggccctgttgtttagtgcttcttatgtgtattttcagtgtgcatacacacagaggctagaggacattgtgtgtcctcttatgtcactcaccctattccttttgtcttagtctgggtttcttttcctgcacaaacaacatgaccaagaaacaagttggggaggaaagggtttattcagcttacacttccacattgctgttcatcaccaaaggcagtcaggattggaactcaagcagggcaggaagcaggagctgatgcagaggccatggagggatattcttactggcttgcttcccctagctttctcagcctgctctgttatagaacccaagactacagcccagagatggcaccacccacaaggggcctttcccccttgatcactaattgagaaaatgccttacatctggatctcatggaggcatttccccaactgaagctcctttctctgtgataactacagctgtgtcaagttgatccaaaactagccagtacagttgaccccttgtcaacttgacacacaaacacatcactagtaagcctcaacccttacattcttattcatccccaagatctcaataaatttaaaagtcctacagtctttacatattcttaaaatttcaatatccatctcttttaaaacccaaagtctttttacaattaaaagtctcttaactgtgggttccactaaagtagtttcttccttcactaccacacctagctcacctttcatttttttttaattactattgctttaaatgggaaatgaaataggagatacactctgaattgtgtattccttgtaattatttggtaacttgagatcttttatcctaaatacaagaaaatacaatgcttcataactttcagccatctgttgttctaactatcgtattaatgtggaccttgcacaatctgatatgtctgtctgtcttccagtccaatttggtaatttgttccatgtagtgtttatgtggaaatagcatttgttacttcttacttccttgtgaaactcaattatggtacaagttctctattgtttggggtgtaatcaataatgcagactgattttgagtaaaagaagaatcacttgcaaagttcatttctggattcatagctaatgtaagcttctttcaggcttctgagccacatccctttctgatacttattttttatacagtgtattttatatccttaacttagtctgtctgcctcccacacaaagaccagaccacagtctctaagactcagtttcttttgagtgaatgagtaaagagaaataacatttcttttacttggaaaaaaaaaagtttaagggctggagagatagctcagtacttaagcatacatgctattcttccagaggacctgggttcaattcctaaccaccacatgacaactcaaaactgcttgtaactccagtttcatgggatacagtaagtactctttcctggactctgcaggctcaacacacacacacacacacacacacacacacacacacagaggagagagagtgagtgagaggcagacagagacagacagacagacagacagagttttaaaagagtatttgctgtgacttcagggtacctggtttcgattcgcagcattcacatggtaattcaaaactgtatgatgtccagttccaggggctctgatgccattttctggcctctgtggacactgcattcatatggtgcataaacacacacacacacacacacacacacacacacacacacttatgtatatgtgtgtatgtgtataaatatatatatatggcaaaacatctatgtgcataaaaaaaatgttacaaagtaaaaatagggctggagagatggttcagcagttaagagcactgattgttcttccagaggtcctgagttcagttcccagcaaccacatggtggctcacaaccatctgtaatgggatctgatgccttcttctgaagacagctacagtgtactcatacacataaaaatatataagtaattatttaaaaataaataaataaataaataaataaataaataatggtttcttatccaggtgatttggaatgcatctaatgctagcattcagtaggcacaggcaggaagattttaagtttgagaccatactgagttacatagtgaccacagagtccccctgggccatatagtaaaaccttataccaaaaataaaatataaatatttaaaatttaaaagaaaacagtagtgattttttttaataaaggttttagaggagaagtagagtacattgacttctgtaattttatgtttcccaaacaggcacaagcctttagaatgttgtttagtaaaatgatagacttggtacttttcctcagttaactctttacccacttagttctacattggattaaaatggaatgctaaagaattaaatttgaatctgttacaacagtttataggtgagtggaaccctgtttaataactttaaaaatggacatttacagttttatgtaagtactacttctatccagtttcaaaatatttgatcacccaaaataaaactccttacccactagcctttttgctggctctgaatctgctaggttttgtttttattttatgtatattggtgttttgcctatatctatgtctgtggatctcatgcacaccatgcccatggaggccagaaggctgttggatcccctttgactggagctacaggtggttgtgagcttctgctggggttcaaaccctaaccttctatagcagacgacagttcttctttagctttgtgaagagtggccaaactgtttccctcattaccaccattactttttttttttttttggtttttcgagacagggtttctctgtgtagccctggctgtcctggaactcactctatagaccagactggcctcgaactcagaaatccgcctgcctctgcctcctgagtgctgggatcaaaggtgtgcgacaccaccgcccggctaccaccgttactttgtaaggatcttattttaccatcggctgtgtatgaggaatctatggaatccatttcttgaatttgaactttctttttacatttatttgtgtgtgtgtgtgtgtgtgtgtgtgtgtgtgtctgtgtctgtgtctgtgtctgtgtgtctgtgtctacgcacaagcagaggtcagagaaccactgtgtgaattaattcttgtaccatcctggttccaaagattgaaatcacgtcatttggtttgttagcatgtgcctttaagccacctcaccaacctgactttcaaattttctatttaaataatgcagtaactgaggtagaaaaggagaatctaaagtggttaaaatgaacaagtttaggggctggagagatagcttagtggctaagagcactgcctgcccttcatttgatagcttgcaactgtctgtaaacttcatttccagaagatccactgagagccaccttcttgcctttgtgggcaatagacctgcatgtggtacacagtaaaaagtgcactggaaatcacttctatacataaaagtaaaacttaacacacctgcttactttctagcatttaacttgctttcattcttttagatatgtggtggatggaggctttgtgaagcaattaaatcacaacccaagattagggctggacatcctggaggtggttcctatttcaaagtaagtctctttatctagcttttcagttcagtaatagtaagctggttagagtatttctacttggtttgaatgttggaagtaaattatatgtcaaacccacaaaaccattttgggactgttttgctgtcttttgtagaagtgaagcattacaacgcagtggccgtgcgggcaggaccgcctcaggaaagtgctttaggatttacagtaaagagttttggagccagtgtatgcctgaccatgtgatcccagagattaagagaactagtttgacatctgtagttctgacattaaagtgccttgccatacatgatgtcataaggtacgtgggtcacccagagctatggctagaatgagagaagcctgcttacttcttgaaaattgttttgtaccatttgactgatgtgtccctgagaattgaaacaagcctatttccagggttggttttcatgttggctgctttttaactaaaccaaaaatgttaatccacctaaaataaaattaagtattttagccattttaaagtatacagttcaaattattgttagtagattcacaatattatgtgaccattgccactttcaaatttaagaacatttccagcctcaaactgctatagttgaagattgaagaatccagaagtaaatagtatttaactatttgccttcatattttttgaaatttttattttaaaacatccatcactttattgagatttggtcctctgctcatatttttttgattgtgagccagcccctaacggctgaaccatctctccagcccactttgcttatatttaaactttggctttataagacttttttatgctgatgcttatttgacttaactttagtgacctctgttttgttttgttttgttttgtttgttttgagacaggatttcacgataactctggttgtcctagaattcactgtgtagaccaggttggcctcaaacttacagaaatctgcttgtctctgcctcttgagtgctggaattaaaaagtatgtgccactatgcctggcttgaccactgttaatttttaattgaaggcatgggactgcaattctaattagaaagtgttttctagagccatatgtaatggtacataccattttgtgtgttagtttgagtcaggccctggctgtcctggaactcacaatgtagactagactgggttcagctcccctcctgctcttacctcttgagtgctgtgtttataggcaagcctgactgttaggaagccaatttagatggtttcaagtaagactagagatttttatgttgttgttgagaataagtcctattatgtatttctggctggcctcgaacatgctctatagaccaggctagtctcaaacacacagtgatccacttgactatgacatcgaggtactgatataggtgtgcagcaccctatctttctcaagattagtgattctctaattgagaatgtagaggaaaacatgtaaaatttagttgtattaataaattacaccaatgagaaagaagtaacaatccattgaaagaaccaagtgctcaaacaagttggaaactttgaggttaatccacatttaaagcagtgttgttctatcttctcacttagaaaaaggagcctctgaaagcaactgcccaaagcttggcattaattcctaggatattctcaaagaactacagattacaaataaccaagagtgaatatacatacaatataagagtgaaactgggctggcgagatggctcagtggctaagagcgccgactgctctttcgaaggtcctgagttcaaatcccaacaaccacatggtggctcacaaccatccataatgagatctgacgccctcttctggagtgtctgagaacagctacagtgtacttacatataataaataaataaatctttaaaaaaattaagagtgaatattcttattaattacttgtatgtactgttattatattcttgctttaaattgtttattaatttttatcttgtgtatatggattttttgccagcatataaatatgtgtaccacttgcatgcctggagatcaggaaagggtattagatcctctggaactggagttacagatagttgtgagctatcatgtaggtattaggaatcaaacctgggtcccttgtaagagcctgaagttctcttaatgcctgagccatctctccaaatgctgttgctattttcgagaggttctcgtgttttctaggctgggtttgaacttgaaatgtaactgaggctggctttgaactcatgatccttctgcctctgcttcccaagtggtaggattacaggtttgtacattacagcacatacctgtaatctcagcccagggagctgaggtggaaagactgctgggaggagtgtgggctacacagccaccgtgtctcgaataagaccaaaaaggaaagaaaagaaaggaagacaagaaacaaatcaggggtaagcctgatatggtagcactttattctctgagccatttcccttgtaattaatttaattttacttcttgggagtcagaatcaggtaggtctctgagaaatcaaggatagcctttagttactattagataatttgaatttatcgaatagttgctttcaattggcttttctctttatttagattgtgtgtgcatgcacacacatatgtgcacatgtggaggtcagaacacaactttcaagaatcatttctcttctcccaccatgttgtcttggagatagaactcattgtcaggcttgatggcaaacaccattactcactgacgcatcttgttggtcctctcctctattttgtaaaaattcagtaaaaacagttgtgccttcagaagagaagagagagtagtttgctgcaaagtatgggtcaggattggttaagagcactgactgctcttcaagaggacctaagttcaattcccagcaaccacctggtggctcacaaccatctataatgagatttgatgccctcttctggtgtgtctgaagatagctacagaatattcatacacaaaaaataaataaataaataaataattttttaaaagacgggggagggggctggagagatggctcagcagttaagagtactaactgttcttccagaggtcctgagttttatccgcaatggaatctggtgctctcttctggtgtgtctaaagacagctacaacgtgttcatataaagaaaataaaaataatttataaaaaaaaagataagaggaatgatgggactgttcgattcagctgaggagaataaaaatatgtgcattttgaatgagatgaatgtgattcagaaaaagcaaaattttcctggtggtagaatgttttcaaggagaggaggacttgaagaatggagccggggctaggtgtggtagtgtaactttaatcccagcactttagaggcagaggcaggcgactctgattgtttgaggccagcctagtttacattgtgagttctaggacaaccagggctatgtagaaagataccttaactcaaaaaggaaacagaataaaacagaatgaagatagagataaagaaaatgaagtagagaattgaaattttttaaggaagtttctatgaagggtgttaaaagtcctgctatgactaatcctgactttctcctatctcatttaaatatacaggtttccatatttggatccacctaatgagagacttattttggaagcacttaaacaactttatcagtgtgatgctattgacaggtaaaaaatataatccaaacatgttagtctttttctttgtttgtaggtatgtagctcaagctgtctttgaatcataatcctcctgcctcagctttttaagtaccggaattacaggtgtgaggctgtacaggtggcttgtctatttgtttttttaagacaggtttatgagtgaatgaattgttttacataaaattaaattagtctgtccttggttttcgttcactacagttcttactaaaaccttgtactgtaaagacatttttttgtagttagacatggtagtacatcctataatgtgtcatctcagtacctgggagcctgaggctaacatttgagttgctgggatgaaaaatatcctttaaaacagttaaaaagttctataaagaaggagaagaaatgaaactttttttttttttggtttttcgagacagggtttctctttatagctctggctgtcctggagctcactttgtagaccaggctggcctcgaactcagaaatccgcctgcctctgcctcccgagtgctgggattaaaggcatgcgccaccactgccgggcctttttgtttttcttgccagtgaccacaatggttttctttaaatggaatttctaaacatgagttgaagtaattcaattatatcttacttactctgaacaatgaacaatgtattgtattgtcccagatttgaaaggcctaagaactttctctttctgttaaggagtggccatgtgacaagattgggattatccatggtggagttccctctccccccacatctgacgtgtgcagtgatcagggctgcttctcttgactgtgaagatttgctgcttccaatagcagcaatgctatctgtggaaaatgtcttcatcagacctggtgagcactttatcttacttaagagctcttctttgtattacattattttatctattcatttatatgtgtgcacatgtgcataagtccatgtgtactcgaggacacacaccttggtgcatgtgtagaagtaaaaccaacttggaggaattggttttcttgttccaccctgtgggtcctgaaactaaaactgagattgtcctgcttggaaagcaactccttttacctggagtctagtgactcctgtaaggttttttttttttttttttttaataaaaaatttaattgttggtatggtgaaacatgcttgtaatgtatgctgtcttgagatagaggcagaggatcctgaattaaagctagactggacagctaatgtgaccctgtctcaataaaacaagtctctgtcactctgtgccttacagattgtttacagacaaataaagagtaagtttagaaggttcccattcgctcagtcccacatttccccagttactactgtcttttatttgtgaaggatgtttcctgctgttgatggtttctacatatatccagtagcctgtgtctatcattacagtcttagtgaatagttttacttgtttcaacatttcctgttctgtctttattcatcactacatcatttctctcaggttatcccttggttttcaggtgcacatgagaatgtatgtgcccacacactatcacacacacacacactaaaccaacccacttagcatttgctctattactgtcttcagagttttgccatctccagaatgccttgtatttgtgaacaatatttaacatttcatgtggatttctttcacttagcagtgtgtgtgtatttttgtagcatgatggttcatttctgtttttaatcactaaactgaattccattctattgtatggaatttgtttatccacttaataaagggaatggtttcattctcatgttttggctattaaaaaagttgtagccaggtggtgggagtgtacatctttagtccactttagaaaagttttagttccagcactcaggaggcagaggcaggcagatctctaagttcaaggacagccagaactatacaaagaaaccctctctcaaaaaaccaacgtaaaaaaaaatgttgcaataacaccactatccagtttgtttgttttagaattttgaaataggtactgtctgtgtagccctggctgttctggaacttactatgtagactaggctggccttgaactcacagaaatctgagtgcccctatttcccaagcactgagactaaaggtgcttgctaccacctcctggctgtgttttcttcaaatctttggcttatcctttcattgttttggcattgcctttagtagaagattttgattttaatgaagcccagtataactgttttcttatgtgatcttgtttttagtgttctatcaatggggtcattgctgtaccatggtcatctggatttttctcttagtgttgttgggtgtgcatttgtttcaacgttctttgttcaaaatattgtttctcttttgaaatgccttccttcccctttgtcatagatcagttgactattcttgtatgaagtttcctaagaagttagataaggtaatccccgactttgttcttccccttcagtattgtcctggctgttcttaggatcttcctcttcacatgaactgcagagtcagttgaaacccataaaatgacttggtgggattgtgtgatctagtaaatgaagttaggaagaattaccatcttagagtgtggcgattctaaccagtacacgaagtctagctatttattctggtttccagtaactcacagagccttttagggggcttaccatacacccatgggacaggaaacaggataaaacaggataagtagttttatatttcattatcctttaacttagttgtttggcataggaaatatataacattcctagccgaaagttaatttcccttcaggataaagctagataataaggtgaacctttgttcttttgtagtaaattagtaatacattaacttgttttcttagactgagaagaacaagtagttcagccctttatccatagagtttttttttttttaaggtttctgtgttcttgtatattttcctttccttgtttcttggtgtgtcagtatgagacattttaacacatgtcggatttttgttttcatctagagaaataacttttcccacagggagcttcagagtagttgctatgccttgtcaacagctaatactgtaacaatagggtatacacctcactggcctttctttttatagattatgactattgggtccagactagtttttcactgccataattataatggtggatctacttttctgtaaaagtactgtgttactgcatcagtttgctgcctaccccaaatagacctccattttaaccgtcaaaattttgattcttgggcctgcaagatggctcaatgagttaaggcatttgctgccaagtctgatgtcctgaggttttcttttcctttttttatgtggatggtgttttgcctacatgtatatctgtgcaccatatgctcgcctggtgcctggtgaggccaaaagaggatgtcagatcctctggaactgctgagaagaacagctagttgccttaactgctaaggtatcactctagtcctgatgtcctgagttcctcagaattcagaacatgatggaaggagagaattaactcctataaattgttctctaaatgagcatacacaaacactaaataaataaataaaatatacttttttataaaattataattctcataacatgcccagttgcaattattttccagtaaaatagtatgaacaataataatgttgcccagtttttattagggagtatcaaagctaaagatatttccaaaattcctggagagtaagaagtagaagtaaaaaaagttgagtgctccagctgtcctattactcaggtttctgaccatgaacctagctttctcagaatcccacctttttcatttaaaaaacaagaaagccatgtgtagtggcgcatgcctgcaatcccagtattttagaagttaacacctgaggaactcaagagagtttgaggccatcttgggttatatagtaactgtatgaccagctgtgtgtatatgtgtgtgtgtgtgtgtgtgtgtgtgtgtgtgtgtgtgatgaaaccttgttaccttgtgtcaggtaaccaaaagggaaaaactaaacaacaccaaaaccaacaagaacaacaataaaaaaacaacaacaggatattgcgtccaactctaacctaactccacttggtaaggatagaaaaagaatcaggcagagtaggaacatcaagtgattttcaaggcctcatttacattttaaaggcataatttaaatatagtggcaggtttacatattagtgtaagccagcacattttgagaaatggatacatccatatagcatgaacccctatccagacagagaatgtttgtggctggtgacatgactgagtcatgccataagaacttgccatcaaagttgacaatgtgagttcatttttgggacccacagaatggaaggaaaagatcaagtcctacacattgtcctctgacctccatattcaggatggctttttttttgccctactctccaatatctaaaaacatttttgagacagggtttctcttttgtagtcatggttgtcctggaactccctctatagaccaaaccggcttagaactcagagatgtacttgtctctgccttccaagtgctgggattaaaggtgtgagccaccatcacccagctttttgcttgtgtgtgtatgataaaacaaatttaaaagatacagaatgggtcttgcctttccttccccttcccccttcccccttccccttcttcccccttcttccctnnnnnnnnnnnnnnnnnnnnctccttcccccttccgctttccctttccccttccttcctctctttctttctgtctgtctgtctgcctgcctgccttccttccttttttttgagatgtgtctctctgcatagtccttgctatcctggagttctcactgtgtagaccaggctggccttgaactcataaagatcctcatgcctctgcctctcaagtgctggaattcaaggcatacacttctgttagggtttccattgccgtgaagagacaccatgaccaaagcaactctttttttttttttttttggtttttcgagacagggtttctctgtatagccctgtcctggaactcactttgtagaccaggctggcctcgaactcagaaatccgcctgcctctgcctcccgagtgctgggattaaaggcgtgcgccaccacacccggctcccaaagcaactcttataaaagtacaacatttaattggggctggtttacatgttctgaggttcagtccattatcatcatggcaggaacatggctggtatgaactctcagcatggagaagctgagagttcttgttctgaaggcaaacagaagactggcttccaggaagcaaggaaaaaggtctcaaagctcaccctgaaagtgacacacttcctccattaaggccacacctcctaatagtgtttctccctgggctaggcatatgcaaatcataaccactattcctggtgataaggaatgtttttaatcactaatagaacagtggtttacactttagtgtagttaaaaaaacaaaaaaacctggggggaaaaattgtgtttttgaacacacttataattaagaaacaagatgtgtgtagtacctttaatcccagaactagggggcaggggcaggagtatcgctaagtttgagtctagcctgctctatatagtgatctgaaaaacagtcaaatgatttttatcctaaagtaaacactgagaaaacagcttgaacatgccttcctccacattttacacattatgttatatatttatgttcacttgtcagctatgtgatggctaatgatgaggtttttgttttgacacagggtcttactgagtagctcccactggcctgaccttgtttgcctttccactgctaggattaaaggcaagaactctcaggcctggagaacaatggattttttttcatgtttttatttagtagattaatcaaaagattagacagggtggcctgaaacttgctgtgtagaccaggctatccttggactcacagagatccacctgccttttcctcccaagtgctggaattagaggtatgtgctaccacacctggcctttgtttttgcttttcctttgactcttgattttttacatttgtaagtgtgcaggtgtgtttgggtgtggaagcccgatgacttcaggggccattcttcaacattcttcaagcattatctttttttttttttgagataagatttcttcctgggtggtgcatgcttttaatcccaacaccagggaaggcagaggcaggtagatctctgtaaattctatgacagagaactttctatgtagaaagaccttgtctcaaaaaaaaaaaaattttcccccactggcctgcaacttgccgaggctgagtaaaccagactggactagtcagttaacctcaaaagtccaccagtcactgcctccccagtgctgccactacaaggagagactaccacatttggattttaaaaaatttttcttttatttgttactttcattatataagtcctagagctcaaactcaggtgctcgtttggcaagcacttaaccactgacctatttcctgatagtctttgtttgtttgtttgtttgtttgttcgagacagggtctgtgcatccctaggggacccaggcagaataaaaattaatctgataaagtgttggatgggaaatttggccagagagcatgtcagtcttaaaatggattcaggagaaattgaatcaaagtaaataaaaggcaaatctcaaatgttgagcaaaagcaattaaactcatcaagtacatactgtgtgatccgtccatatacagaaaggtttaaacaaggctggtgagatgggccagtgggtgatggtacctaccactgagataggcaacttggatttcactattgggatgggaggagaacattgattcttgcaagttgtcttctaatcttcatattgcttgctgtggcatgctctcacacacaaaataaacagatgttttatctgagacagggtttcactgtgtagccctggctgtcctggaactcaactctatagaccaggttggccttgaactcagagatctgcctgcctctgcccactgagctcttagagtaaaggtgtgtgtcatcatggcaaaaaaaacgtgttttggggggctgaagagatgggtggctcagcggttaagagcactaattgctcttccaaagttcctgagttcaaatcccagctaccacatggtggctcacaaccatccataacgagatctgacaccctcttctggagtgtctgaagatagctacagtgtacttacatataataaataaattaaaaacaaaacaaaacgtgtttttaaaggttagaaacaggaatgacaaatctgtggagttagaggttaggctgtggttacccttctgggcagagtggatagtggtagaaggtaattgggcttctctgatgctggtatgtgttcatctgtttgagtgcattgttagactatgcttatgactacctctaggggtacacacagcttatacttgttatacattattacatttgtaataggaatgcttaatgtatatggaggtcctctttaattacccattattctgagttccatatatattggctggttaaactgtgtctcctctttgtacatttaggcagtgcttgatcactttctgtaagtgtatgttgtattcatttgccatggcattatatgtggaagtgagaagacaaaactgtagagtcagtcctctccttctacctttacatggattctggggattgaacttggggcatgaggcttgtgaggcaaacactgtgacctgttgagccatcccgctgagccttggccactgttttaatccttaagaaccatatggtggaaggggaaaagtggaagaacacaaacttaatacagatgttcttgaggtacctgctgatccaattcatctgaagtcaaacatgtgttaaaaacaccagcctaggggctggtgagatggctcagtgggtaagagcacctgactgctcttccgaaggtccgaagttcaaatcccagcaaccacatggtagctcacaaccacccgtaatgagatctgatgacctcttctggtgcatctgaagacagctacagtgtacttacatataataaatagataaatcttaaaaaaaaaaaacaaaaaacactagcctagtccacaaggctgcatggtggcgctgcatggtggactgtgactgctgcttatcttatcctcatgattgcatggctgactggaagcagaggctccttatgctgctactgaccagtattgggggagactgttgtgctgaatgttgggaaaagatgaaaatagaaagttggaggtaccactttgactgagtgtaaagtatattcctttacactattataaagttagattagtctaagttggggaccatctataatagtgattagctttgaagactgtgttcatgtgacaaactgtggacatagaacttttaccttgtatctcttttaactgtcagctactcttacgacttttttttaaagaagagtaaattataaagaaaaaagtaaattccagatactattttaaagacaattgaattgagaggaggaatgttgactgtcataaatctctagcatgtgtttaaaagaatagttataataatagttatgtgtggtggtatacttctgtaatcccagtatttggtaagcaaaggcaaaagaattttaaaaccacactatgttccatacatgccaaattctgggtcagcctgagctatgtaggaagatagtctatcttgtaaaacaacatcaaggtggtaatcgtggtggggaacaatggtgatgagatgtaaggagaaacagaacttgagaagagctaattaactctacccccaaggagtgaggcagctgttgttgaacatggtggaagaggaagcaaagtgaggcagggccttgatttaacatggaactaaactaaatttgacttttagttgatccagagtaccagaaggaagcagaacagagacatcgggaattggcagcgaaagctggaggatttaatgactttgcaactttagctgtcatttttgaacagtgcaaatcaaggtatgtgagcttgtcctttgtactggaaaatgtcactttgatctgcagcttccttacatacttttggtcatgcaggttcaatgttagttttcctttttccctcaaattctttctgaaaatgaattttacagagttttgttttcatatagatactcagattaagtgatgattagatatttgttaattcatatatgtaaaaagaaacctcttttataaattatttaatttaatcagaggacctgacattaattttttgtaatattttcttttctttctttaaaaagatttactttaggcatatgaatgctttgcttgcttgtatgcatgggtaccaccagtgtatgtggtgcccatggaagcagaaaaaggcattggatcccctagaactagagttcctgatggatgtgagccaccatgtgggtgctgggaattgaacccaggttctgtgaatcaccagaaatgctcttaagggatgagctacctctccagcccccaatgtttttctgtttgtttgtttgtttgattttgtcaaattttctaaaatgcttttttagtgcttgtccagatctctgcttttgttgttgcttggctggctggttagttggttagttgcttgcttttttgagatggtcttctgtagcctagactagcaacagccttgctgtatagtagaagatgccttgcactcctaattccttctgcctttatctcccaactgccgaggttacaagcaccctggccctgcaccacccatgactggtttccattctttgtaaaggcagtgaggatgttttcgtctttcacggatagaaggtatttgaagacagcagtgtttttgtgttgtagtggagctccggcttcgtggtgccagaagcactggattcactggcggtgcttattctctgcatttcgtgtggaagctcaacttcgggaactgatcaggaaactaaagcaggtgactgctgtggcttctgttgtctgttttctcaactagcgttgtaggtctctgtagatcatactgaattttcagtgcagtaatttatatttgtaccacccattctagtcggttactttccctctgcatgctactctgtatagccagccgtctctctgacccagtgaatcctcatagtggtaaagaaatgtatctgaaataatgaaaatatttttagatagtcgtgctgaagaataattgatacacactgaacttcacataggctggtgagatgattcagcaggtaagggtgcaagccaccaaatctaatgacccaagtctgacctcgggatctcacaggttggaaggaaagagccaactcccaaaagttttcctctgacctccacacattggctttggcatgagcatgtccatttgcccactcaccacatcagtgtaaaagtgtacagttctctgagttttgatatctatacatacctgtttaattattactacagtcaagacagtagggctgggctgttgcatacctttaatctcagcatccttgaggcagaagcaggtggatggatctctcttagttgaggggagcctaaaaaaaaaaaaaaagaagaagaaggaggaaggaagaaggaggaagaagaagaagaagaagaagaaaggaagaaaggataatagtgctgaagaggctgcacagtggttggatcacatcctgctctcatcctgttgagagtttggttcccaatacccacactgggtgattatagcccccaagaactggatgcctctggcctcccttcctatactcacctaattatacatacacctctcaaaattacatgctattttatgtgcattttctgaggtgggtgatgtcatggtctgactgtagcactggctggcctggaactcagcgtatatctcagggccatcccaaactcagcagtctgcctgcctctgcctcccaggtgctgggtaatcttcttctaggtcctctaccccaaaccagttcttcgaagtattcacaacaccattcttagccctgggagataccaagcagtgtgagctttctgggaggttatttacttgggcagatactttctgcagatctttcatattttttgtttttgaacatctctcctgaacttgctctttcctgtaaattccagtcagacttggctctgtttccttagtagtaagttctctgggttccgtttggagtttttttcttagaactcttaagactagggtggagcttttgttggtgtaaattttctatttcctgagtcattgtcctttgttatctgatacatagccttccataattattattttatatattgtttgtcttttgactattttgggtgcaatgctaaatgtaatccgtctcataaagtctttagaaatgtgaactttgaaaaaaagattagatcaaattgtactgtgagctttatcattgaatacatactctttctacagcaaagtgatttcccaagagagacttttgaaggccctaaacatgaagtactacgaagatgtctttgtgcaggctacttcaaaaatgttgctcgaaggtaagagttacagtgcttgagagagttgatagacactactgtatctaactgcagtgctaaacaacttaaagactgaagatgtgatacagattctgtgatgataacaattatcagaaatcttttcgtaattgccatctgtacacagggaactgcagtggttcaaagtgaggcactgaagaccagagagaaagggaggagagtgcgtgtatcagcacctgaagcaaatggcaagagcatggttgtagtttggtagcctcaggtgaaggttaggagccaaacaagatagaaaagtgccgggcaatggtggcgcacgcctttaatcccagcattcgggaggcagaggcaggcggatttctgagttcgaggccagcctgggtacagagtgagttccaggacagccagggctacacagagaaaccctgtctcaaaaaacaatagatagaatagcatccctggggaaggtcagtctgggtatgtagtgtcagagctcaattataagatggggagaagcaagggatctttgtaaggaaagtagtaacattggcaatgggaaattcattataaaactgaagaatgaataacgtcagtaaatatgttaggataatggtgagggagttgttagtaggcatgttggtttatgcctggtatcctagcagtatcatctgaaagagactgggaacaggaaaccactatttaagtcagaagagcctgaacaagtgctctaccatgaagaacatggaaagtaaaggtggttctgattctaaattgagtccttctgctttaaaagatattattaggacattgctgatacttcagtggggtctcaggatttgatgttagtaatgcatgaatgttaactttctgttttggtgattgtatcacagttatgaaggagagtggcaagcatttggtggttatgggtaagacaacaggttggaaacttacttccaattgtcaatgcttccgataaaaatcatttttgtgggctggtaagatggctcagcggttaagagcgctgactcctcttccaaaggtcctgagttcaaattccagcaaccacatggtggctcataaccatccgtaatgagatctgatgtcctcttctggagtgtctgaagacagctacagtgtacacacatataattaattttttaaaaaaatcgtatttgttttgtttttgtcctttacaattttctgtaaatttagtttattttagaatgagattcaggttcagagagagactgttgtcttaaagtgtatagctatagaggaagataccctgcattgacctctggcctccctattcacatgcatgggctcgtacacacacatacaaaataattgaagaaatgtgagatgggctaacatgcttaagttactttaacataaaatataattatagggctggtaaaatggcttggtaaaggtgcttgccctgaaaaccttatgacctcaggttggaccttagaactgaaataaaggttcatttgactccaaagttgtccttggcttccacatatgacaaggcatgaatgcaccacactcccacccacctattaatatatatttttaaatgtataaagcataaacctaccctcttgtaatagcagcctcctttatttaaattgtgctgaaaagaaatgtttttactgtatggatagatactcttaggagaaatagaatttgaggaatacaagtgtttaaacccagttcttgtgacattattgttacttaaagagattcctcttccctaggtaaactgctgcttattttagtagttaagaaaacatcagttaccttattgctttactattttgatctttatcatttgatttttctgtttatagatctgttggcagaacattttgcacaatggatgggcgtggaagtccagttcatatccatccttcctcagcagtaagttcttgtttatttggttggttggttagttggttttgagagaaggtctctgtgttgctgaggctgtactctttcctctgcctcccaagtggtgagacagacttacagacttacaccgccttgccttgtaaagcactcctttgtgggtttggtttttgttttgttttctcgtgcactttacatcctctgcccttaaaaagtcctctttttcaataaaaggttttatgggagcgtggagaggcatatgcatggaggggtcagagagtaacttgcaggagtcagttttttccttccaccaggtgggtcctggggactgaagttgagccatcttgacagccctaatgtatcttatttttaatgacaggtaggcatttgtaagagtagagtactaacatatcagtgtcttctagttttcactgaaatgtcatatagagagagtttaggggtgttggttagcatatgatttctgttttgtggaagaaaatgggcattcagagggtttcaggttatttttctgttattttggagacaggtctgtagtatgtagtccttgactgtctttattttcttgctcttatttagaatggggctgattattaatattaataaattatccttaaatttttatatagcttcatgaacaggaaaccaaacttgaatggataatttttcatgaagtattagttaccaccaaagtctatgcaagaattgtgtgcccaatccgttatgaatgggtgagagacttactacccaagttgcatgaacttaatgcgcatgatttgagcagtgtggctagacgtgaaatgagagaagatgcaagaagaaaatggacaaataaggaaaatgtgaaacagctaaagggtgagtgaatcatagttctattctgtttttctaagaaggggtttatgttgtagaccagagtggcctcaaaggtctggtgatcctttgccacaccgtcctcaacactggggttataggtgttctcttaactatgaagctgtctttcccccctttggacagggtttctctgtgtactcctggctgtcctaaatctcactctctagaccaggctgggcttgaagtcagaaatctgcctgcctttgtcttctaagtgctgggattaaaggtgtgcaccatcactgcctgactcactcctttgtttttctttttcccagttttatttatgttgtcaggatcagcagcaagtgcctttatctgctggctcatgtactttttgttactgtactggttgtcctagggtcttgttcatgtgaagtgtacattgtaccactggagctcagcacctacatgcttttcaaccagacttttggttagacaacatttaatttccttttgatctttttttgtaagaaaaaatatttgtatgtatatgatgtgtatatttctggttgaccatgcacacgtggaggtcagaggacatcctcagttattggtgcttgctcaagatagggtctctggttgctactatgtactccagtctagctggcctagagctcatagttattttcctttctccacctccaatgctatacaagtgcatgctattgaaccgtctcctcagtccttttttcttaatgttgaaaataaggtatatttatactattttcagatggaatatcaaaagaagttctaaagaaaatgcaaaggagaaatgatgacaaatccatatcagatgcacgggctcgcttccttgagagaaagcaacagagaatccaggaccacagtgacacattaaaggaaactggctaagcagtggactatccaattcaggaagcaggaaagcagccaggaaacgtgcttctgttttgccagttatttccgacagtactatcagaaggaagtggtcagcagctgttcctagcctgtgagccgaaagcaaatcagaatttataaatcacatctcatcaatactaacaaatgacattttgaaaggaaagattgggttgcatagtcatagtacatgaatccaatcaaagatgatacaatatttccctcacttctgttttgctggccttaactggtatcaaacagtgtcactgagatattttcaaagaacactgaattgtatttaatcagcgtgtattccatttgcattgaagcattaaagattattttccttaaatctcttcaaggccttcttattgctgttagaatagtgttgtatcaggtatgtgaccatttcagaaggctgaacttacatagaggttttactcagcaatacttagatgtctaacagtttaattgctccagagctttataggtatttaaagactgattagtaaataaaattgcctatggcaggactttcttaaattaatcctactccttaaagtgatttttttgggattatacaaattcctttttatataaaagtatattgtttaaaacagtagctatagccattaaccaaaggacagatgtgtatatgtgtgtgtgtgtatgtgtgtgtatgtatatgatacataatatcacacacacacaaagttctttttagctattcctacatacttgtgtgtcagcccatgtatgtaggtgtgaccgatttcaagcagcccctccacctggcctttctctctctctctctctctctgtctctctgtctctgtctctctctctctctctctcctctccctctctccctctctccctctctccctctctccctctctccctctctccctctctctctctcctgcacctgcttgagtaggaccatttaaacacctattatgctattcttgagatgggatttttcaaagcggccaacacttcactaatgtttcaaatcaaaaccttgaggctaatattacactcaggccacactcagcacttgcctcctcttgtttactgccttgtattgtagttatgtgtgtatatgtctgtctttctcattagattatacgctccttgtgggcagggtctgtctttttcacctttgtacctttcatggcatctagcatagtgctttgcacatagtcgtcactcagtgtttgttaataaagctactagtgtcattaaaactctatagacagtatgtggatttttgttttcaggttttttaaaaaattctttttatgtaaccctagttggcctggtattactgtatagaacaggctgacctcaaactcagttatcctcctgcttctctctgcctctcaggtggattttatatacttgtgccactatacttggcaaggttttatatctttagtataaaaattactcctaatttgttttgataggtaattctatcctttggtatccaaaaagtttaagttcagtagttatacttgaagcctttctgaaaagatggtgttagtctgaatcctgcttttctttgaaggtaagtagtgataattaatttattgtttccagtatcatgaatctgcttaaaaatcatttaggctggccaggcagtggtggtgcatgcctttaataccagcacttggaaggcagagacaggcggatttctgagttcaaggccagcctggtctacagaatgactaccaggacagccagggctacacagaaaaaccaaaagaaaaatcatttaggccttccagttttcattttcaggtgtattttacccttagaaaagatgtgggtagattctttgaatgaaaacttttatagtttttttgtttagccttattttttatcttctgtgtatgggtgtgaattgtctgcatatatgtctgtgtaccacttgtgtgcctggtgcccctggagaccagaagcaagcactagatgccctggaactggatttacagttccagccatacaagtgctatcaatcaaaccagggtcctctgaaagaacagccagtgcttttacctgctgagccatctctccagattctgaaagctcttttgaatcataaaatattaaccaccacattctacatctatagtccaaattcaaatttcaccagttgttccaataatctcttttactttttaagcagaatgaaagtaagctatagagaagaattcccaggagagagaaagggtttccaagggaggaataggcctaatattttgttgtttgttttgagccagagtttctctctgtagccctggctgtcctgggtagttattttatatggtactagtttggctttctctcctttttcctaaaactatgtgtgcgcatgcttaccagcccacgagtaggccaggggtgggcatcaggtgttagcatctgacactttcagcctcattgttttgaaacaaggtatctcactggaactgagagtgcttaccaactgaccagaatggctggccagcaattcccaggaatcatctccacctcccagcacagggattacaggtccaagtgtgccgaggatctgaactcaggtctgcgtgcttgcacatcagtctacccagtcccacaattagacaattgttacttgagtgttacataagctatcagaatctcttctaggttatcacagctgaaagtataggaacttgccctcattagtgatactaatctttactagatggtttttaaggaaagtttcttcaacctacttcttttataattccaaactattttggggctggaaagatggctcttcgggtaaaggtattggcaatacaagccaaatagagcctgcgtttgagtccctgagcccatgtcacttaaagagacaaacagtgccaagaagttgtcctctgactttagtctctgtgctatggcacataggccacacaaacacaccatgcctacacctatatagcaataagtatttcccatttaaaaagtcatttgaagggaagatactttaggattattaaaataccacatcacaaaacacaaggatctatgtaaattgttgattcttgctgacactttatgggtatgtttatttgaattgcttttatacctaacggtctaaagtaaaatgctgggattacagacataaaaacaaacccagttttatatggtactggggcctcataaatgcaattattttaccaactgagttatatttctagtttcaggtactttttaaattttatgcatttatttttggtattataaggaaaaacattccttgaagaaggaatttccaataaacatgtgtgttctatgaacaacatgtactaacacagaaagctccagggacactcatagacatataatttaaaaaggaaaaatctttggacttgagagatgggtgtcttagaggctaaaagaacttgctgttcttctagagaagcagaactcagttcttagcatccattgtcctctcctggcctccatggttgtgtaaaacatgtacaaatccaagcagacagacacatctgtacacgtgtggtgacacctgcctttaataccagcactgggcaggcggaggcaggcagttctgtgtttgagggtggtctggtttatacatagttgtttcaggtcacacagatttgcacagatcctgtctccccacctcccaaacaaaacgaaaaacaaaaccttgggttatttgagaaggtggactagcagatttacttggtgcatagagtatatatgtaggaaagaaataatctcaaaagcctaaaatcacaggtcatggaaacccgtggagtgggaactatagaacatactgatttgttaggaatgtcattacagctttgacataattgtgagaatattaataaaatcctctcaatctctattaagaggattattatgggaatgtgtgatctaattaaggcatgaagttgaagagttaagatagtggttttagggggggtttgcccaggaaagaatggaaacttgccttcaaattactaaacaaaaggaaacaatgttatacatgactaatcatttcattaaaaagaatgaaccttaataattaaatgcgatttctttttgcaagaaaatatcttaatgagatttccagtttttatcttcatttcctgtgcatgtgtgtgctacagagtgcatatggagagcagaagggctcctcgtgggatttagctctctccttgcagtctgtggttaccagaaattggggctcagatcatcagccttaggagcaggcaccattatccactaagccatcttgctggcccgaacaaatttaaaatgcaatcttcagtctctcaaagatttccaaaataattcttactatttgttcactgcttttacaaatttaaaatacaatagaaaatttcccttgtgaagtcatttaaagatcaaataatgtgtccagataaaaatacacctgcgttcctaatgtaagatgacttgatttttcacttaaaatgtatgaaatgggattggttaatccaaactataccctaacatcagattgatgtttatgttacatataaactgggtttttggtactaaggattgaacctgtgcatactaggcaagcgttctacaactattagcagacatcaccagcccctggaaatgtaaatgattgttctgttaagtccaggtgtggtattggcatgctagcatagtcttcaagttaagggtaaaataatcaatgaatatgattctggcttgagaaggtacatgagttttaagctgggttatcaagaaataggacttaactgaaacaaaaattagagaaaaggaaccagagttaaacaatgggaaaagttctgaatatactgagaggggctttaagagaggtgttacaatttctagcctgcatcctgggtaaacactcagtatgtcaactaatagtgtgagtgccattcattttcttgaagtcagagtctctcagactcaagttcattatgtactgagggtgacctggaattcctgattctgcctgtactccaaatcctatgattacaggcatatactatcacactgattttatgtggtgctggatagtgaagccaaggcttcatgtttgctaggtaagtacttctaccagcagaactatatatccccagcctgaatgccattctaacagagaaagccttttaagtctgcagagattttccgttgtagtatgtagtccttacagtccatcattgtgtgccagtgtgttcctccaattaattccccttaaagaaataaatacattttttaatcctcccttagtaatgaggcttatcttaccatatctgagctagaggctgaactagatagtaattagaattatatagagactgtttataagagctgggtttttgtcagattggtttttatttaaagcgtctctatatttgtgtaggtagtggaccttagaaccttttatggctcttggtgttaacagggctggctcagaaaaaggaaaaaaaattgtaatcattaagtatgaggtaggtttctatatttgttacttttctgtaaaatctctttgtgataaaacagcatgactcaaggcaatgtaaggaagacagagtttactttgacttacagtttcagaggcataaaagtggcaggcatggcggcagcagggagccatgaggtcacatcttgaatggcaagcctgaagtagaatgaactagaatcagggttaagtcatactctcaatgtctgcccaagtgatgatctacttcttctagaaagaatatgcctcctaagcgatcccagacagcaccaccaccaagggaccacacacccaaatgcataagcctaggagtcacatagctctcttgactgctgagccatctctccagtcccggttatgtatttctcattcaaagtattacagcttagatcttgaatgccatgaatttttaaaatcattgttatcacagaatgaatagaagctttatagttgtattaatggacaatgtaaaagttagttacttagaacatgagcaaccaggaaaagccaatcattgtgtatataacattttcatggtttttccccccttccccaagactgtattgccttggctatactggaacttgcttgtagataaggctggcttcaaactcaaagaattgccagcctctacctcctaaatgttgggatcaaagaagtgtgagttttgacagtataacttttttgttttattttagattatttatgtatataagtgcactgttgctgtcttcagacacaaccgatgagggcttcagatcccattacagatggttgtgagccaccatatagttgctgggaattgaactcaggacctctggaagagcagttagtacccttaacagctgagccatctctctaggcctcaattttaattaattaattaattaattaatttgggtttttgtttttgtctttgtttttttcgagacaggatttctctgtatagccctggttgtcctagaactcactttgtagaccaggctagcctcgaactcagaaatccatctgcttctgcctcccaagtgctgggattaaaggcgtgcaacaccgcctggtttcaattttatttttaaaaaaccagttgtgggaagccacattagccattacaaggtagcgctggctactgttggccaccacgtataagtttgggtaaacaaccaatgtgtacatatgcagtaaagtttttgccaagtcactgcctggcctgggcatgatgaggttctatgaggttctgagagtataaccaatcggatgagagacatgtaaatgaggtatgataatgaggttctgtgaggtactgagagtataaccaatcagatatgagacatgcaaatgaggtagaatgcataatcaatcggggtgtgagacgcacctctcctaggcctatataagcagcaccagtataagggctcggggtcttttcgcctctgcaatcaagctctcccaataaacgtgtgcagaaggatcctgttgtggagtcgttcttgctggcgagtcaggcgctcacaccagtcttgctgtgcatttgtggaatctcgaaacttgctatttagaccaggctagcttcttaattcacattaattctcctgtctccatctcccaagtgtgggaatgtaggtcagtggtagagcacttgcccagtatgtggtgcctagccctgccccctccccaaggtttttcttgtgctctaggtttggtacatactaaagtcacaatgtttgttaggagtattatataaaacttcattgtggtgaacatatgatgtgttaagattcagaactgctttcctgtaccaattttctgaactttaaaaaaatatcttgccaggcagtggtggtgcatacctttgggaggcagagacaggtggatttctgagttcaaggctagcctggtctacagagtgtgttccaggacagccaggactacacaaagaaaccctgtttggaaaaaaaaaaatctctgtgtacgaagagagggtgttggatccctgaagtttcagatgattgtgagctgcccaatgtgggtgctgggaactgaactctgatcctctcagagaattcttagccggcagcccccaccgggctttttttttttaagcctttaaaaaaaatttaacatctgtgtatttgacattacagaagctgaaaaatatttaaagtcataaactaggttataattccttaaaactttattactgatttaaataaaactttactaagtttcagtccttaactagtctgccctgaggtagtgaaagcttactacaacttgttactgagaactatttgagtgtgtcaaaactgattgttaaaggaataggtttgtgggtcatagtttgctttgacctgaagacagtaataactcaagaaaaagacagttctgcatatatagaactggggaatatagaactggggagattacttagagacaaaatgcttggtatgtaagcatggagactgagtttgagtcccattcaatagttttaaaagttttgttcttgcttttcttttttttaaattggcacacagtgccatatttataagtatgtgcttataatcctgttcttggaggcaggagtgaccaaaatgaggcgaacagcccctgagaaccatctgaggttgccttctggcctccatgttcacagatttaagacatgtgggcgggaaagccacgtaacaaatcattcccactacgtactctcattgccctttcaatagaacctctccagcttttgtgacctgttactgggtgaggaaaaagatgactgacatttattgatcatcagattccacaatgaatctactatatatttaaaccaatgttctaagatgactttttggggtgaggtagtttttggtttgatttttaaattcattttatgtgagcatactgtagctgtcctcagacacatcagaagagggcatcggatccctctacagatgcctgtgagccaccttgtagttactaggaattgaactctggacctctggaagagcatgcaattgttttaactgctgagccatctctccagcttggggagagatattttaagagcagaggtcttacttggtaatccaggctgatctggaaactactatgtagtctagactggcttcaaactcaaggctgatcttcctcttgacttagccttcctagtgctgggattaaaggtatgacgctccatactgcctgaaatgacctcctaagagaacaccaagctattccctctgccagaatctgttagaaactggagggacctgtttaatgtgaccagagtcaaggtcagttcccacaagattagtcttagcctttcatttggaatatacttggtgctattttagtgaatactcactgtacatcttattgccatccctgatccattatagaacttgtctatagggtattcaagaacagcttgacagtgaaagaaagatataagctcaggtccatttcagactaaagtagaaaggccatattgctttgcaaatgttttttgtccactctttatccttgttgaggaactttgcctatagtctgatcatactgcactgaaacacagtgggcactatgttgaccaatccctaagactcaagggagattctctttcttagtggcaagcgctatggttctcttttatcttgcatgaaaagctacaattcttatcagtagctctaaggggctgaggtattttaaaggtgctgtttaaatggtgaaaccagaatcttacctgtataattccaaagtgtctcttatggtttctaaaatctgaattatatttggtatgaagcattagagttctactttccaattaatcattgtctatctgatgaatgtctatgacttttacactgcaattagttcaagctgtttttagaaggctttgggattgccttaagatgaactactatggaggaatcctataaaaaggtttggctttggggtggggacagtgagggagagacagtttctctgtagtttaggctgcccttgaattccccacaacctcacccacagaagatgaggcataagcctcactcagggaagttcagagactacaggtgtgagtcatcatgtgtggctatcaaagattttgttttgaggcaggatctcatgtagctcagtctgttcaatataggaaaccagccctgaattcctgactctcttcactatttatatcctggcttcccaagtgccaagtgctaggattacaggcatgtaccagcacacccagcagaaaagtggtgggttttgctttgtgttccaagatggttacacatctataaccattacagagttcctggtataaaatatagaactggcgaacaatacagttttcttgtgtagattttgagaaactacaattcctcaaaataacatacaaagcaatgtttttgttatggcgcttactatataagggcctgctgttgataactctgtaaaaatagcttcaaattcataccttgaccatttagtacatgacctcttttactaaaacagggcaaactaaaagccagggtgatgactcatcctttgcagcagtctgtttgggtaaaaaagttacttacgcaggatagcaggatttgttttagagcttatcaggttatctattttaaggtagtgcttaaaaccacgccttttaggtatagcttagaaaacttagtgcctcagtgtttgggatttcttttttctttttggttttacatgatagggtttctatgtgtagccctgactgtcctggaactcactctgtagacccggctggcctcgaactcagaaatccgcctgcctctgcctcccgaatgctgggattactgtgtttgggatttctaaaccaggaactgtcctttcccctgtctctgtcctgctggaaatttagccagcacaatctcatt

SEQ ID NO: 1430 - DNA, 849 bp, Mus musculus
tgttcgcttcttctccggaccgggtctatgtcccggtttcccgccgtcgcgggcagggcgccaaggcggcaggaggaaggcgagcggccaatagagctccaggaagagcggccgtcagctgttcgcatcgctgacagagaagagaaaggatgcacatcacaggagggaggaacaactccaacgtttcctattcagaaacaaagaaaaaagctcattcaagctgtgagggacaactcgttcctcatcgttactggaaatacaggaagtggtaaaacaactcaactccctaaatacctttatgaagcagggttttcacaacatggtatgattggtgtgactcagccacgaaaactggaggatttaatgactttgcaactttagctgtcatttttgaacagtgcaaatcaagtggagctccggcttcgtggtgccagaagcactggattcactggcggtgcttattctctgcatttcgtgtggaagctcaacttcgggaactgatcaggaaactaaagcagcaaagtgatttcccaagagagacttttgaaggccctaaacatgaagtactacgaagatgtctttgtgcaggctacttcaaaaatgttgctcgaagatctgttggcagaacattttgcacaatggatgggcgtggaagtccagttcatatccatccttcctcagcacttcatgaacaggaaaccaaacttgaatggataatttttcatgaagtattagttaccaccaaagtctatgcaagaattgtgtgcccaatccgttatgaatgggtgagagacttactacccaagttgcatgaacttaatgcgcatgatttgagcagtgtggctagac

SEQ ID NO: 1431 - protein, 117 aa, Mus musculus
MSRFPAVAGRAPRRQEEGERPIELQEERPSAVRIADREEKGCTSQEGGTTPTFPIQKQRKKLIQAVRDNSFLIVTGNTGSGKTTQLPKYLYEAGFSQHGMIGVTQPRKLEDLMTLQL

SEQ ID NO: 1432 - DNA, 2991 bp, Mus musculus
gtggtgcctcggggcccccaggagcgcgggcccgtgcgcgtccaagcagaggccgccacgtcatcgagccgctcccccacccctctcagccagtcgcacgcgcggaagtaaacacccctacgtcatcagggcgcgtcctcgcctttcccctcccatctcctcggctccgtggacgtgttcgcttcttctccggaccgggtctatgtcccggtttcccgccgtcgcgggcagggcgccaaggcggcaggaggaaggcgagcggccaatagagctccaggaagagcggccgtcagctgttcgcatcgctgacagagaagagaaaggatgcacatcacaggagggaggaacaactccaacgtttcctattcagaaacaaagaaaaaagctcattcaagctgtgagggacaactcgttcctcatcgttactggaaatacaggaagtggtaaaacaactcaactccctaaatacctttatgaagcagggttttcacaacatggtatgattggtgtgactcagccacgaaaagtagccgccatatcagttgctcagagggttgctgaggaaatgaaatgcactttgggatctaaagtaggataccaagttcgttttgatgattgcagctccaaggaaacagcaatcaaatacatgactgatggatgtttactcaaacatattttgggagatccaaatcttagcaaattcagtgtcattattttggatgaagcccatgaaagaactttaactacagatatcttatttggtttactgaagaagctgtttcaggataagtctcctaacaggaaagagcatttaaaggtggtagtgatgtcagcaactatggaactagccaagctctctgcattctttggaaattgccccatatttgatatacctggaagactctatccagtcagagagaaattctgcaatttgatcggaccacgagacagagaaaatactgcatatattcaagcgattgtgaaagtgaccatggatattcatttgaatgaaatggctggagacatcttagtttttctgactggccagtttgagatagagaagagttgcgagctgctctttcagatggcggagtctgttgactatgattatgatgtacaagataccacgctagatggcttgttgattctgccatgttacggctctatgacaacagatcaacagaggagaatatttttgccacctcctcctggaattagaaaatgtgttatatccaccaatatttctgcaacgtctttgacaatagatgggatcagatatgtggtggatggaggctttgtgaagcaattaaatcacaacccaagattagggctggacatcctggaggtggttcctatttcaaaaagtgaagcattacaacgcagtggccgtgcgggcaggaccgcctcaggaaagtgctttaggatttacagtaaagagttttggagccagtgtatgcctgaccatgtgatcccagagattaagagaactagtttgacatctgtagttctgacattaaagtgccttgccatacatgatgtcataaggtttccatatttggatccacctaatgagagacttattttggaagcacttaaacaactttatcagtgtgatgctattgacaggagtggccatgtgacaagattgggattatccatggtggagttccctctccccccacatctgacgtgtgcagtgatcagggctgcttctcttgactgtgaagatttgctgcttccaatagcagcaatgctatctgtggaaaatgtcttcatcagacctgttgatccagagtaccagaaggaagcagaacagagacatcgggaattggcagcgaaagctggaggatttaatgactttgcaactttagctgtcatttttgaacagtgcaaatcaagtggagctccggcttcgtggtgccagaagcactggattcactggcggtgcttattctctgcatttcgtgtggaagctcaacttcgggaactgatcaggaaactaaagcagcaaagtgatttcccaagagagacttttgaaggccctaaacatgaagtactacgaagatgtctttgtgcaggctacttcaaaaatgttgctcgaagatctgttggcagaacattttgcacaatggatgggcgtggaagtccagttcatatccatccttcctcagcacttcatgaacaggaaaccaaacttgaatggataatttttcatgaagtattagttaccaccaaagtctatgcaagaattgtgtgcccaatccgttatgaatgggtgagagacttactacccaagttgcatgaacttaatgcgcatgatttgagcagtgtggctagacgtgaaatgagagaagatgcaagaagaaaatggacaaataaggaaaatgtgaaacagctaaaggatggaatatcaaaagaagttctaaagaaaatgcaaaggagaaatgatgacaaatccatatcagatgcacgggctcgcttccttgagagaaagcaacagagaatccaggaccacagtgacacattaaaggaaactggctaagcagtggactatccaattcaggaagcaggaaagcagccaggaaacgtgcttctgttttgccagttatttccgacagtactatcagaaggaagtggtcagcagctgttcctagcctgtgagccgaaagcaaatcagaatttataaatcacatctcatcaatactaacaaatgacattttgaaaggaaagattgggttgcatagtcatagtacatgaatccaatcaaagatgatacaatatttccctcacttctgttttgctggccttaactggtatcaaacagtgtcactgagatattttcaaagaacactgaattgtatttaatcagcgtgtattccatttgcattgaagcattaaagattattttccttaaatctcttcaaggccttcttattgctgttagaatagtgttgtatcaggtatgtgaccatttcagaaggctgaacttac

SEQ ID NO: 1433 - protein, 775 aa, Mus musculus
MSRFPAVAGRAPRRQEEGERPIELQEERPSAVRIADREEKGCTSQEGGTTPTFPIQKQRKKLIQAVRDNSFLIVTGNTGSGKTTQLPKYLYEAGFSQHGMIGVTQPRKVAAISVAQRVAEEMKCTLGSKVGYQVRFDDCSSKETAIKYMTDGCLLKHILGDPNLSKFSVIILDEAHERTLTTDILFGLLKKLFQDKSPNRKEHLKVVVMSATMELAKLSAFFGNCPIFDIPGRLYPVREKFCNLIGPRDRENTAYIQAIVKVTMDIHLNEMAGDILVFLTGQFEIEKSCELLFQMAESVDYDYDVQDTTLDGLLILPCYGSMTTDQQRRIFLPPPPGIRKCVISTNISATSLTIDGIRYVVDGGFVKQLNHNPRLGLDIVVPISKSEALQRSGRAGRTASGKCFRIYSKEFWSQCMPDHVIPEIKRTSLTSVVLTLKCLAIHDVIRFPYLDPPNERLIALKQLYQCDAIDRSGHVTRLGLSMVEFPLPPHLTCAVIRAASLDCEDLLLPIAAMLSVENVFIRPVDPEYQKEAEQRHRELAAKAGGFNDFATLAVIFEQCKSSGAPASWCQKHWIHWRCLFSAFRVEAQLRELIRKLKQQSDFPRETFEGPKHEVLRRCLCAGYFKNVARRSVGRTFCTMDGRGSPVHIHPSSALHEQETKLEWIIFHEVLVTTKVYARIVCPIRYEWVRDLLPKLHELNAHDLSSVARREMREDARRKWTNKENVKQLKDGISKEVLKKMQRRNDDKSISDARARFLERKQQRIQDHSDTLKETG

SEQ ID NO: 1434 - DNA, 65538 bp, Homo sapiens
ggagtgcagagttctgggaatctggtggcccaccctgtgcagggggtccctgaccactgtgtcttattcttacaattcgtatacatttgtttgttgtagctcaaaatgttttcactgggtcctgtctcttgacacatttcacttgcatatctttgggccaccagaagttttggcatgtctgtccagtggctctggttgtcccacctctgtaccccaagacacccgtgggggctaggctgggggcgctgccacactgggacggagtgatgcctgctctgtccttctgacccctggactgtgatgggccctctgctgccgcctctcctctccttcacccggcaggcccctgagcaccctgaacagccacacatttggccagaagcaaaaagaccagtgggcactgcctgaggccgtgtcaccgtgctgccaacagcttctgtgcccaaacaggtggcttccctggccctgaccccgggttcccaccagtgcctccacccagccctctgtggggctgccctcccatggagtctgacctctgtccacagaagggggagggcaggaggctgattccaggtcagggagctgttaggggggctcttggatagaccctccccagctagtgagttggcaagagacagaaactgaccccatggtttaggggcggctcccacgggagggacaggaggagtaagccatgagaggaggccctggctggtgctggcactgaggggatagattggggggcatctggctttgagaggagagcctctcccccaaaccccagccctgcccctccctgggcctctcagatgctgttgctggtgaagtgttcaggagaggagattctgattctcaagtatcattcagcctgaaaaaggaagttttgacacgggctgcagtatggatgaagcctgaagacattctgccgactgaagggaggtagacacaaaagcacagatactgggtgattgcacttatatgaggttcctagaacagtcacatccatggagaaggaagcagaaaggcggttgccaggggccgggggaggacgaatggggagctgctgtttaatgggtccagtttcaattttgcaggatgaagaggcttctggagatgggttgcacacagtgtgaaggtagaaggtactgagcatgactgaactgtaccctaaaaatgggtgggtgggtgggtgggtggggagtgaaggagcaaaaagaaatggttgcaatgggaaatttatacttgtatattttagcacaataaaaaaacccaagagtctccgaggactggcagtgctcattgaatgctcacaacagccacgtagagcagggacaatcaaccctatttacagatgggcaaaccgagacggacccttagaagagcggacaggcaagggtgcaccccggggcgtccagcctcccccaggccctccagaggcctgtgccagtcctgcttctgcttgcccaccctgggcccctccccacaccccagccccagctccccacaccccaggaccccggctcttccgggaaatgcaccacatccccgtccctgcaaagctggattcacacagagaaagaactggggactgggggagccaccatggctcggggcctcccatccgcacttccaatgcctgagggatacacccctaagtggacccccaagcagatcccccatcctggagagatgcgggggttttcgctccggggggggccactggtcgtccccaccttcagcttccggtggcacatttgatcctagggaaactccaggctggcagcctgcaggccctggtgaatgcctgggcccagcgcagacacccctgctgcgcggtggaggggccctggggaaatccgagcgggactctcaccaggcaaggtccacatcctgggcagggtggggtttgacgctggttttctgagtgacatggctgaggccacagctgggctggggctggtggggttggggaggggtctcccatcccacccccaccccacacaaaccgattcctcgctggattgcgacctcttctggcctcggtttcccagccagtcccggccccggccggacatgcaccctcgggggcgggaaaaggtcccggagcgtccgccggtcgggcctcggccccgggactctggcccttgcctgctccatggggctcggggctcggtccgggaggaggggggtcctttctgcccggggcagcgggcgcaaccggtgggcaaaggtccgcggccctggagaacgccgcggcggggtccacggacaccagaggaggaaccgccaaggtttatccaaaggacaagcggcgcggcggtcctcctagctcctcggcccgcgcgccacccgggaggccgaaccggccccagccctgggccccctccccagcccgccccagccccgaccctccgctgcggggccctcccggagcggccggccagcggggagcaactacgctgccggctgcaacgcgtgtctccccgggacgcagctccgcccttcccgggaacaaaagcggctgcccgcgcctgagctcccaaacggctggcgggcagggagcgggcgccgcgcgccggctccccggagcccagccccgcaaatgggacacccacagcgggtgcccccaaacttcccacctctcccgtccggtcgggggaggggtcggggccggtgggcagggcgcggagagcgcacgaagcgcttagggggtctgcggccccgcggcggggggttatgccaagggagaacgcgacgacgcgagggggagggacggagggcaccccgaagccggggaccgccaagccggagccagtggagtggggcgaagtcggcgagttggaaacttcctgcaatcgtccactcctagcctttggcgttcggctggtcctctggcggcttggcgggcggctgcgcagggctgggacctgtgctggatcgttaggcttccgaagagatggtcgccatccttgtcgtggtcgcgggcgccgtcagaggggcggcggcggccggcgctggcagtggctgggcgcgcgggggcgtcatggggcaggtcccgcgggaagtgggggaagtagccagagatctgctggatggggcggatggggccggggcacacgtcgatggccacatgctcctggatgcaaacggtcgccttttccccgcgccgccgggggtcatacaggcagcgcctcgccgcccccgcacggcctggcccggagcgacccccgccgggggcggctcagcaggcccggcatggcgcggcggggcctccgcgaaggccagcgcgagtgagtgccaggggcgggcgggcagggggccggcccagcccgtgtcacccggcagcaaccacgcagcgtgagtgtgcgggctgcccaggcagcgcggagcggagagagctgcgtggggccacactcactcgcactcacaccggcggacacgccggcctgggaccccgtgcgcgcactccctcgggacaagcggggagccagcaggacagggacccacggatcgcacactcactcacacgttcctgcaggtgccagcacatgcggggctccgttcgctctcacgggacacacgaaggtgtgcaaggacaatgcaagtgcacgcacacgtgtgcagacacgtagtggaagcatccactcgctcatacctgtaagacacacacacacacaaacatatgcacacatacagagttggttgaggatgctgtaacacagtacaccccctaatgcacacacacacagacacacgcacacacaggtgatcaagggcacccaggggagaatcttccatacccccaaggacccctaacaagatgcacaaacatgcacccatagaagtaatcaggggaccctgggcacaactccctctctccttccccatctaccaggacatggagtcacactcctaggcatgtgtggacaggctgcctacacacgggcaggacatgtatatgctcaactgtacaaggacactgcgggcacactctgcgcacacatattctcaggtcacataaacacagcactctgtaacctggagtcagtccctcacttggtcagtgagtgggctgaagcacccactgggacagggtggctgagaaccaggacagggcctggtcaggaggggttgagggcagggcctgggaagtgagtgatgcaatgaggttgggcagtaccaccccccacccaaccacccactgcaggcctcccacatcatcgggtcactaaacaaatcccagagggcccagccccagctgttgcctggctttccagaaacagaactcggttgggaatcgctgctgcttggacaggtctgtccccagaaagccctgggcatggatggagtcctgtctaccctctggtttccactgacacatttacctaccaacattctgtccaagtctcctcttctgagccctcaccagaatcacccttaatggagagtcacagggagaagacgtccacccgcgcatgagaagacaggcctggaacagagccttcctgcacagcctcagaagggacccaccttgctgacaccttgatcttggactcatggcctccagtactgtgagacagtaacgttctgttgttgaaggtgcccagtctgtggtactgtaaaacagccctaggaaactaacacagcctgttagcccacagatggtggagagatggaatgctccatggagctccaggcttactgtctgcagcccccaaagtgtgctccgggacccttgggtgggtgtaggtatgcaaggtaatttggggtggttcaaggtgaagaatttcaattgacataataatgtatttatcttgctgggtaaatgagggatccccagctgttaggaaccaggctacacagcaggaggtgagcagccagccagtgagcaaagcttcatctgtagaaacagccacttcccatcccttgcattaccacgtgagctgtgcctcctctcagatgagcggtgccattatctcataggagcgtgaaccctactgtgaactgcgcatgccagggatctagattgcgtgctccttatgagaacctaatgcctgatgatctgtgactgtctcccatcacccccagatggaaccatgcagttgcaggaaaactagctcagggctcccactgattccacattatggtgagttgtgtaattatttcattatatattacagtgaaataatagaaatgaagcacacaataaatgtaatgggcttgaatcatctccacatcatcccttccccttctcccgggtccgtggaagaattgtcttcaagaaaactggtctcaggtagcaaaaaggttgggaaccgctggtgtaaatgcttcaaggaatagttaagcagcttaaggtttacatgctacaaaaagtacaggttcaaacgctaataaaaatgggtgcaaatgaaaacactctcttgctgtggtccaaggagttttaagcattctatcagaaagacttgcagcttggagctgcagctgccctcccacatcctgtccactgtaacccctgcaacacacaaacacacatatgcacacacgcgtgcacacacacacacacacacacacacacacgctgtgcttcatgccctcacttgggtggcctgggagggaatgtgtttgtttgtttgtttgtgtgtttgtttgtttgttttttgagatggagtttcactcttgttgcccaggctggagtacaatggcgaaatctcggctctctgcagcttccgccttctgggttcaagcaattctcctgccttcgcctcccaagtagctgggattacaggcatgtgccaccatgcctgggtaattttgtatttttaatagagatggggtttctccatgttggtcgggctggtctcgaactcccgatctcaggtgatccgcctgcctcagccttctaaagtggcgggattacacgcatgagtcaccgcgcccagccgggaatgcatgcttttaggagaaacgaagacaactcaggcccctcattctcctggtgtttgcacaagtgccttctccacagaccatgcttcagtctctttcttagttctccttcttactgaaagagagaagcagagtcccatcatgtacccagctgcttggggcccaagccaagtgtgcaagcttcctggggagcctagtgagtggaaggcactgcagactctccccaaagaagcatcagtttttgatggatccttgagcccaggaaggcaatagacaagacatcatggttcaccagaagagacaacaaaaatgcggtgaggaagggcagtagtcaaaggttttatgctccatgagaaggggttctcagggctctaagcagcaggcagactttattgcatgtgtggttaggtgatggcgacctacagttttcactgggaactgggatcaagagtaactcgacctcctactcctgcacgtctctctctgtctctttgtgttttgtatctctctccccatctcaccctccttatcctctcagcctcctctgtctctctccaaatctctcttcctctctcactttcccttctcctcatctctctttctctctccttcttttccagttctctctccctcctcatctcgctgcatgccactgttcacgctcctggggctccacgtggacaggtggacatgggactcctaggctaattttcacggcacaagcacagggctgcaggaccttggtcccccacctcccagcaccctcaaaatgagaggtgtggggtctgcccgtgctctcctgggtgggcgtcccacgctccaggaagcagaaactgcaggacaaagctggcgcaagtgacatgcccgcgtggctgccggcttccatcttgggatctgctgaggccaaagcagaagacacctgccccggaccgaccctgcaccagggtaggggtaggggtgggtttgggggtgggaagggcgatgggagcagacactgcaaagcagtccctggctggcttcctgccccgcaccctgccatgcgaggcctctcctcccgcccccagccctgcccctcaccacctccacccctaggctgtccagatccaggctccagaagtctcctaggatccaagaactaagggcaaccactgggctccgcagcccctagtccatgagtcagccacccctctgcatgctgacaaaccttggctgtcacttatcctccaccccaaaccagccccagccccatcctattgcaggcctgtgtggctgctggagaggctgggctcccttcctcaccctgaggctgcctgatatgctttctggatcctggagaaaactgacccactattctcatactggtgcaacttcttccaagacctcaaaactggaccacatgaacttgtcttccttcttgtttctccttgctagggctgtcattgggacagtccgagatggggggtcgggggagacaatggatgaatggatggatgaatggacgtccccccaccagcattaccacctcctcctaaacatagtcctgagagctctatttcctggtaaacttcccccttcccaccctggtccagagaagcccaaaggccagtgccctccacccacgcttcctggggtacactctactctcttcttgcccagatgtcttaacctggctctaccaagctagaacagatagcagggatgagcccccagcctctaccaggaagatttgccaaaatgttctcagtttagaagcaggggcagtgacggggcctagggatgaccccagggttgtcactcaagcaacaagaagggcaaggagccctgtttcctgcccttatcctgggagaacttggccagggctccacaatgccctgcaggggcaggaggagaacaaatacacccttctctggaggaagtcaccaccatccccaggaagcaggagatgggagcacactggcagagccctcgcgtgctatagggcaaggccggcaggtctgtactcagcctcagccccaggggagctgcaacatagactgagaccctcacatgtttggctctgtgtccccacccaaaactcatctgggattgtaatcctcctgtgtcaagggaggaatctggtgggaggagattggatttggggacagtttcccccgtgctgctccccggatagtgaggtagttctcaggagagctgatagtttcaaagtgtggcacttactggttctccactcactccctcctgccgtcttgtgaagaaggtgcctgcttccccttccccttctgccatgattgtaagtttccggaactgcaagtcaattaagcctgtttcctttataaattacccaatctcaggtatttctttacatcagtgtgaaaacaaatgaatacagtccccttccctgaggtgccttccccttaggcaaccagctgcccccatgctcctcttctgccccctggtatttcctttcccctcatgaggcccaagtgatccacatggccagccccagccccatcctactgcaggcctgtgtggctgctggagaggccaggctcctttccgcaccccgaggctgcccgatatgctttctggatcctgtagaaaactgacccactattctcataccggtgcaacttcttccaatacctcaaaactggacaacgtgaacttatcttgttgcttgtctcttcttgctagggctgtcattgggacagtccgagatgggggggtggggggagacaatggatgaatggatggatgaatggacagtagtccagggagatgtccctgtgtgtcctgaactgggcccttcctccaatgagaagccttcctgagtgagtttctacagtcatcccttggtatccatggattagttctagggtccccggggatgacaaaatccatggatcctcaagtctctgacataacatggcctagtatttacatatcagctatgcacatcctcctgtagacattagaccatctctagattattcaggatgtgtaatacaatgcagatgctacataaatggtcatgatactgtattctttagggaataatgacaagaacaaagtctgcacatgttcaatagaaatataaccatccaatttattttctgaatattttccatctgctgttgctgaatctacagatgcagagctcctggatatgagagccaagtgtgctttgagagtagggtgggtgaggttgctaatgagtacagggggacaggtgttgatcaggaggaccctgcactggggcatctggacgtcctgcctcaggacttgagactccagttggatggcacaggcagactcggcacaggcagactcagcccaggtcaaagccgtccccttgaagtttcattttatcccaagctctttctggaccctggaatttggcatcccctaggccctgcgtggaaggacagatgaatcaggttttagataacatgtctagaagagtgagcccctactgtgtgcccggcactttcctcacaggatcctctagctagaatatccaagggtcatggagagaaatacccagttaaaatatcagaaatgaaaaagcgataccattagagacactaaaaagaccattaggtaatagtattagcttttgtattctgagatccagcagcagcagcagtcacttccctccacccctatgtgtatcccaggaccaccctgggcagggagggctgaggttagggagcagccatggatgctctgatgctggccctgggcgctctgatgctggccctgggcctcgggggtgacagtgatgaggaactgggtgcacacatgagtggggcagccgggcctggccagagaagcaacacacatgtgcacagacatgtttagccacatacacgtgtgcacgcacgtgcacaaacacattgcaggcaggcatgttgacgcctcaggcagcggaggaccctgactctgggcgctgctgacccgggcaaggccccattgtgatgcgtgccatgacctcagaatgtcactggtgcttagcacctatccgctctctggcctgcctcagtgttctacggcagttacacacaggcagtggtatctgtgagcagctctgtggactcaaaggttttctccctgagaggcatgacccaggccagctgattcatcagagtcaggtgagcgtgacctgctctcttccctccaggcggacttggagacagtggctacggtgcgggcggtgttggcctctgtggggcagctaccgaggagggtcatccctgagcactcaccaggcgcccgttctacactgcccgtgtagacgattggctctttcgtctccatggtggcttcgtagagtgggtgctgttcccaaatgtaaccattcgacagatgagacgtctggggtcagagaggcagtaaccggcctgggaatccggacatgaccctgagttttgctctcagccctgccgtgtgctgtgctggaattcaggcctgaaccctgtgacctccctgccctagatcccaaatctgcccaggtttccgatcccgatggggcagagcctggtcctggcagagccactggtacagatccactggtacagatccactggtatagatccactgacggtcctcagaacacctctgtgccctaagctgggtcccgatggtcgctgtgggccccactgaacacacatggtcccttgtccgggggagcctgctgcccttgggcagctgtggaaaatgaaggagccctggagggctggctgaggggagactatcttcccttctgttcaaaggggtccgggcactagggttctccccaggcatttcttgctctgtgtggtcctcttgaggcctcgccctccttttgcctcgagtattcccaggagggacagtccatccaggtgttctccaggaccaaggacccactgttcttcctcagtgacccaagaaaatgaagcctcctcctgttgggacggctcagaatggtggactccacagtccctccgcgagagacatggtttccatgcgtacaatagatctttctcatcccccaaaccgaacaccctcctgctcaacaggcgttattcctgaagtggcttcactgttcagactgaagagccacggtagccaaagtgatcagcggagtagaaccgagcagtcaggagagatcttgttccctgtaggaaactgggcatctctgaggccctgagcatcccaggaggccgattgtacagagacctctggtcgctgaccccagtctgcctccacatccctggaatagcccatcatgggcccttcacccttggcaggtggaaaccattcaacctgctggggccggtgtgtccccatttcatggcattgggggacaacaggattctctgtctaggtcccactgtactcaagtccttgggaagatgcccacccctgcttgggacttgagactccagagactggagcagctgtgggccactgggtctggcccctttttccctgggggcggcggtggaatgggggttacgcagccagccagcatctgggagcccggcgagagcggttcaggtgttctccgaagccgccgcgtacagtgtgacctttagacaattctgtctcacaggatggacgtggtagaggtcgcgggcagttggtgggcacaagagcgagaggacatcattatgaaatacgaaaaggtacaagtcggtctgcttcttggagggaggcctcttccagtgtgccctggtcaaagggtcctgggctccctaggagcacagggcagggacgggtggccaatgcccccaggcccttgcaccctttaccttggacccctcaccaaggctccctctgggctacagggacaccgagctgggctgccagaggacaaggggcctaagccttttcgaagctacaacaacaacgtcgatcatttggggattgtacagtgagtcctctgcactcccctcacccctaaagcacctgtctcagctcagggatgggtttgcttttagaaaggcctttctgacgcaggacatgtctcaccaggtcgggtcaacctcctttccagggacagaactcctccctgactcccctgcaggtccagcccgaggttgttgttaggccagaggtgtggggcccatctagggagctggtgggaatggagactgggctaggtcaggcccctgggcgctcagcagttctgtcggcaagtgagcacaagaggagctgggcagcctgagggtctggccctgtctacttggagacaaccccggtgagatgcaagggttatggccacagggtgaggggacgcctggcccggcctcagggctgttgtccagcaggtctctgagggcccacctgcccctgttctcccccatgcccctagagctatggccctcactgtcccgtgaggggaaaaggcatggtgacaatgggggctgtagccctaggagaacggggggaagatgggcagggccccgttctgggcatctcacggtgaggccggggaggcagcagggctcgcggctaaagacctgggtctggtgctgggaagggatctggggccgggtaagaggagcccagccaggagcccatccctcagggatcacaggatggagagacagaggatcccaggggaggtagggcgggagggagctgatgagccgtgccacttctgaaacgcagggtgtgtggctcgggtgcagggagaggcaggtggatgctgggaggtcagaacctgcaagggccttggggctgtcaagtgggatgggcccctggtgcacccagagtacacggggcaggtctcagggcaggctcccttgaccctggcggggtgatgtggtcactccctgagggactcctgtcagggcccggtcacccaccctgggcggcccccatcccatctcagggctaacctttctcagctccagcagaaagcaccacctcgagtccaggacgggcagccccactgggcagcctgaccgccccccacgccaggggccccagtaaccccggccaggctgtccctacactccttcttctcccaggtcctgcccctcctgggagtcagccccacaggaaggcccttgtcctcccttccctgtgccttctcctgggctgagccctgagctggaaagggacagagccagtcctttctgggggtcggcacccaggctggggccgctccaggccccgtgcagttcctcagctctgcctgggttgccttacagtgagacggagctgcctcctctgactgcgcgggaggcgaaggtaagagcctgatgcgtggaggggctggtccagggacgtagggactgggcgggtggtcagtgaggcagaggaagcagctggcctgagcggtggcgggtgagggcaacacgctgtcactgggaggggcagcagtccctgctggacctgaccccaggttgctgttaactttggcagtttgataaaattccaaaaggagaaccacagtcctggcttgggggtggctgcgcgcttgtgtcaggaccccacctagaggctgggacctaagactggtgtggctgtggcctgaggatggtacatcccggggtcccaaagccagcccactggtgctcatttgctcaaaggctctcagcccttgaggtctgcccttccctggctccttccagctggctcccaccagggctccagagcccaagacccagcatccgcgggcggctctgggaagcctggcagctccgctaactccaacatgcctcatttgacagcaaattcggcgggagatcagccgaaagagcaagtgggtgaaaatgctgggagaatgggacacctacaaaaacagcagaaaggtaatgtgtggagggaggaagcactctctgcagagacaggggacaggcacccatggctgtggcctggcgccgtcagcctctcagagggtgggtggcacgctgtcctcgcccagaggactgcaggcctggtcgccagatttcctgcctactcgtgcaagcgtcaccttgctgggagggaatctgaatctagggctgggactacccggagctcaaggctagggatgccctggtgacctgaaggaaggaaaaggttcagatcagagtttcgactctgagtgtccatccactctttcagtcctgggaagggagaccctgtcccagcttgatctcacctctactgaggaatcatggggccaaaaccaacaatttccagaatccccgggctctggtcctcactggggtcaccccgtggcctgcgacaccagattgttttctgcccacagctcatagatcgagcgtaccagggaattcccatgaacatccggggcccgatgtggtcagtcctcctgaacattgaggaaatcaagttgaaaaaccccggaagataccaggtacgctcagccagagcacaaccaacaggacaggccgtgtcaggggcccaggtctccagctggagggaacgtcaagaccaccctggggagctgggggtgaaggtcagatgaacaccctgggcacagatggtgacacagtcaccacagacaaactcagctctggtgaccctccctggcttcagtaacaagccaaaatgcagctttctgcagaaggaaaccttccttctgtccttccttcccgaagtgctgactgtgggctgactgccactgggggcagggagtcttccatctgttctgagactgcttcctcctcttggccctgccctacagatcatgaaggagaagggcaagaggtcatctgaacacatccagcagatggacctggacgtaagcgggacattaaggaggcatatattcttcagggatcgatacggaaccaagtaagccacagggtcccagcagagatggggtgaatgagagggatgggggcttccccggagcagaagccagggtcacccaggagggatgacacagctgccaagagctctcctggcccagggagcagccggcaccatgaaccgagcacctccctggttccaagccctgggccagactggaacatgtggggccagaacccaggaggatcctgaggagatggaaggcagcaaacaaaatcatgcacaatggtgaaaggtgctctccctgacccatggggacccatggtaggagccacgggagggtggcaggatagagggcaccaaatgctgggagaattaggggtcctggaaactctcatccaggtctgctgggaacatgacatggcacagccacgttggcagccagttgggcagtggctcacaaagctcgatggacttgaaccacgcatccccaaagtgtcacagagattgaacccactgatttggaaactgacatccacatgaaacctgcatgccaggttcactgcttgactcctcgtcactcacacacggagccttcggggacggccttcaacacgggaatggggagagcaaggctggtcctcccttcaaacggaagacccagtgagaaaagggaacgagccagtgatgcccgcacgaacgtgggtggatcctagatgcattttgctgagggacagaagccagacccaataagctaccacagtaggattcccattcctaggccattctggaaaaggccaaaccacagggactgagaagcagtctgggtggccaggggctgacggatcggggagaggctgggtgcataggggccaccctggagacttggaggatgaaggagtcgccccaggaggggctggagcggtggccgggagactctgcacattggtttggaaccgtggaggaactgtacacccacagactgaactggggtgtgtgcaaactgaaaaaaaaaaaaaaaatcattcagagtgaaaaggatcaggcactgtacaactgggctatttgcatgtcacagatgtggattttactgaaacatttcttcaagagtctcaggccctgaagagctcactgcttatccggtgaatcatctgaacctgaaatgggatttgctgttaggctttgtagacaaagtgaaattaacaacatctgcacaaaacaaaccaaagccccctttctctgtttcctaggcagcgggaactactttacatcctcctggcgtatgaggagtataacccggtgagtattcccggcagtgaggttcccgggccatatttccatattcacaggagtgggtgtctggtgggggtgtcgttgcttcttttaaaattagtatttgtgacccaccaggatataggaagtaggatgtcagctcactgctggcataaacctccaaggaagggggtggtctcaaggggtcaagctgatacacaaaggagtcagggcctggactcctggtgtcacctgggcctgaccaccacttctcagaacaagaaatgacgccgtcctcctggggctgccccaaagcccaggagcttggcagcatcgcacacaggatggtgctatcagcagacattttggacaaggtgctgaagtgcctgatggacttggctcttgtcatgaaatgaatgtgcatcctgaggaagcctctttttcagaggaagcctctccttcagaggaagcctctccagtcacctctgccctctccaatgacatgagtcctcccaggtgagctcagccctcccaggtgatgtccttccatggtgactctggctcttgcaggaggtgggctactgcagggacctgagccacatcgccgccttgttcctcctctatcttcctgaggaggatgcattctgggcactggtgcagctgctggccagtgagaggcactccctgcagggtaagtgaacagctgccccggggacctcctgcagccagacctggggatggccaccctggccaggtgatcacagctttcagccaaggcaccctccttgtgtcgccagcttgttgggagactttaggatgtctctgctgagggtcccacaggagtccacggctgacccccaaagcccaaatcagacgcctctcatccccatcagcagagggcatctcatcctccccgtggccaccctctgtgtcctggagccacgccctccggctctgattctgtgcagctgactctcccctccctgagagtcctcctgccctccagctgcccgggctcctgctgccatcggtgcccacgaatgggccgaccaagcccaggtggcagcatctccccatcccctgttccctggcccgaccccactaccaggagatgaccaggaagcccagcacccacccagttccagccgccctgtggtggcctgaaagtcaggcttgccctttttgcaccctggcccaggaggcctccaggggaacctccagccaggctccagggactgttcccgccccacctccccagggtaaaggccgcatgttggggtcaccagatgggagggtgggaggccttggggtttgggggcctctccagctgcccagctcttgcagctgatggctccacatcttgggggaaggctctgatttcacgatgggctgggggcttctcaggatttcacagcccaaatggcgggaccgtccaggggctccaagaccaacaggagcatgtggtagccacgtcactacccaacaccatgtggcatcaggtgagtttatggtcccctcagctcttcccagaggccctgcctcccgtggggctgtaggagcaggggggctggagcccctcgtggggctggtgactggctgagtcccagccagggcctgacctgggacgtcgggttctccatgggctgggagttggtttcctttcctgccctggaggagacagaggcacagggatgggggcccagctcccgcagagcagggcaaagggcagcgtgtccaccgggagtgtgggaaggtgacagtgttgtggggagctctggacaccgcccagtgttctgcactaggggaagggtcttcagaggccctggaagagggaggtttttagggcagcccagtggcctgagcacctctgttgcttccatcaggacaagaaagatctatgtgggcagtgttcgtccttaggctgcctcatccggatattgattgacggggtaaggaggcatagggagaccctggctcagggaccctccttgccctgcagtgccctgcttccccagcccgggggtctggctcactcccagcccacaggaggctcaggcgggtccccaaaggacacacaagcaaaaccctctgcccaagaggggtcatcccagggcaatggctggggctcaggcccagcctcatgggcagactgggccaggacccgacttgagagggctcagggaagcctcaagccctgggcaagcccctctctccaggagccacatccccactcaaatgagtgcctcccatgaggagcttcaagaccttgtctgacccagcgtcctggagggctcaggcgaccctcatggggaaggaaggtcactgactcaggagactgaagccccagtgtgcgcagctcgagccaccagccccagcctggaaggaccaggttctttcacacctgctgtccccacagatctctctcgggctcaccctgcgcctgtgggacgtgtatctggtagaaggcgaacaggcgttgatgccgataacaagaatcgcctttaaggttcagcagagtaagtctacgtgtgcccagcggggcctggggagccctggggtcagaccccgactggcccgagggcagcttcctcacactgtcctcatgatcctctgttctggcccagagggaggtctggccaggtgggctgggcaggacactgtgacaccgagcccatcccccacatgacccagatgaaagtcgagagtgtggtgagcacttccctgtccagatcgccccccagccacagtctcctgtgtatatctggacacctggggtggccacaaaaggatccggcaccgcccagtaggagactgaagtggccacggggtatgagctgtgaccattcccaggtaactcccctggcctgatatccaccctgtccctagagcgcctcacgaagacgtccaggtgtggcccgtgggcacgtttttggaaccggttcgttgatgcctgggccagggatgatgacactgtgctcaagcatcttagggcctctatgaagaaactaacaagaaagcagggggacctgccacccccaggtgggctccagtgccatgtcccctcccatgtcaccctctggggtagtcaatagtaggggagtgcccgggacccgcaaccctactacctgggccttcctcttcaccttttcttcctcctcttcctcctggactctaagaaagtacaggaggcccaccggtcctcagggcaggcgctcagtgcgtgtatactggacatgctgtgcacgcaggagggggatgtgggcgagaccctccaacaagccccctcccactttctgcggtgtctccctctccccctcgcagggccctccaagttactagccgagcccagacccatttgtgggagaccccgcccctccctgcaagcacccacagcctcagagagcagcagaggcccctcactcctgcacgctcctccaagcttgccaggacaacgagcctggagccagggagacaagggaatcggtgtccctgacccacggagctttcagggagagggcgcaggcgggaccccgggcccagggccagagccaagagttcagccagaagtgggaacggtcagtcctggcatggactgggcagcccaggagggcagagggtgacccacgtccgggcccaatcacccactgcggagaggggtccccacctgaggtggcaaggggctgggtgacatccaaggcccctcccacctgagttctgactgggggccgtatcccaggcccaacagccctgggacgaaggtgtgtggcaggaagccgccagccagtctgaaccctgggggcagtcccaggagccacccgccatgccacgacagcttccccacgccaggcagcacgcacccctccctctgggatcagcagactacaggcgtgtcctcagtgtcaggccacgggggccacacagagaccccgaggactccagagacgcaggcaggtggggcccagcccggaaaggcctgcgtgggctcactggagatgctgaccgcgtctgttttcctttcagccaaacccgagcaagggtcgtcggcatccaggcctgtgccagcttcacgtggcgggaagaccctctgcaagggggacaggcaggcccctccaggcccaccagcccggttcccatggcccatttggtcagcttccccgccacgggcacctcgttcttccacaccctgtcctggtggggctgtccgggaagacacctaccctgtgggcactcagggtgtgcccagcccggccctggctcagggaggacctcagggttcctggagattcctgcagtggaactccatgccccgcctcccaacggacctggacgtaggggacccttggttccgccgttatgatttcagacagagctgctgggtccgtgccatatcccaggaggaccagccggccacctgctggcaggctgaacaccctgcggagcgggtgagatcggctttcactgcactgagccacaacgtgggcatggacttcccggccctgcagtgcgcccagcactgattccgaccagggcacccccttcagagctagggacgaacagcagtgtgctcccacctcaggaccttgcctctgcggcctccacttggaaagttctcagttccctccaggcttctagaagcatctgggccagggctcatggctggataatttccctaggcttaacaacccaagcaagcttcgcctcctcgttttattttttgttaaacttatgagaatgtgttaagaaagagtgcagctcgagagacattcagagatggaacacaccagaccccagatcacaaagccaaccatgcccagcccctcccaacacccccagccccacgaccatcgttctgaattctgacgacgccgtgagcctgcctttgtactttaaactcatggaaggataaccaccttcacgttttgaaataaatgtttcctgttgaaatgattttagattttagacagaaatattgaaaaggcactatagtgtcctcctataccttccatccagctgcccctaataatgatgttttgcagtcccatggcacataagaaatttaggccgggtgtggtggctcacacctgtaatcccagcaatttgagaggtcgaggcgggaggtgcaggttcacttgagtctagaagtctgagaccagcctgggaaacctaggtggacccggtctctagagaaaagtcaaagaaattagccaggcatggtggcgcgtgcctatagtcccacctagtcaggaggctgaggcaggaggattgctggagcccacgagttccaggaagcagtgagccatgattgcaccactgcactccagcctgggtgacagagtgagactttatctcttaaaaaaatttaagaaatttaatgtgggtacaattctattaactaaataataatgtgaactattatctaaggttatgaaggctagaattatcccatttttgcctaacttctcgtacctgtcccaagatcccaccttggactcaccctctgccttccactcatgtctcttcagcttccttcacatggtccagcaaacacacacctgggctgaatggtagagctgattgctcatacacaaaggtagaccggtgggcagggattttcagacttatacagtcaatgagttttccttggtgttctggagagcaccgttgagaaacactttgacagtgaatctaggcctcaggatccatcagctgctctagcttgaattttgctcaagctcagtgaacacctgctctgccgggtgcacgtgaaaggggcaaggatgagtaagctgtagataaagaagacaggacgcagggggtctgtctaagctctatcccctgccttcagcactgagggatgaaatccaactcttagggaacggtggccacgtgctgggccagccccaggctctcaggatctgacagtgagtgacgcagaaccaggccttgcccctggggagctctccagcatacacctccctctcccctcccagcgtcccgcaaagcagacgtcaacgccattgttaatgcacagaggaggaacctgactgttagacctgggttttccagggttgcacggcttctgggagacggatgtgaccctgaggatagggcacaggccagtgtaatgccaggatggaatgagctgtgatctgtgctgcacagaggcctaggccaaggtgggactgacggatgaccaggtcagccgggtcactgaaaacactcttgggtcctcacctgctggttcccaggagtccggaactgccaggagagtggtggcaggtcccccatcctcagctgggtgggcctggatagaacagcaaggcgagggcacatttccctggccgttccctccaggcacagctgtgacctgctcattccaattttggggaaatatttccacatacacagaactgcaaagagcagtggacatggtgagaggtgtttggacatgggataggcaggattttggaggcagagcccccagggcttgccgatgggttagctgcagggcttgagcggggaaggagaatccaggatgatgtgttcacatcggtccattcgcttcctccgtgccacgcctgtgctgggcactgggagagacagatgagcacaggagcaccaggctgggggaggtgtggggggaagcccagagtgtctgggcagggtaggaaacccagagcgtctactgggagctgaaggcttatgtctacctcaatgctgtccgcgttcgctgtatgaacaagttcaggctgagctgcctggaggaggagcagctgctgttgctggtgaccagcacgttcgggaacggagactgctctggtaacggagagatgggtggcctgaggtctggatggtctagggggtgatagggcacagaaggacccaggaaagggtctgggggatgcaggacgttctacagagggcgtttgggagtcagtgctcaggtcactccaggtcacgcaggtcatttgctggcctctgtcgtaattattgccatatgagagtgccacctttcctgcgacataatttagatattcctgtgaatggcctacctgtttatatttacaacttcatgtttaaaggaaatttgtatcactctcacaaatggaaagccagcaaaacataaattcaatgaaaacaaaatgaagtcaatgaactttagctagatgctattccctgaccaaggcctgctggaggcggtacaaccagggtttgaattgagatctgccaagcttctgagtttattctgtttcccccgcaccagggttcctcaatactgcattactgacatcaggggccagacgattctttgcgatgggggctgtcctgcacctggcaggatgtttagcagcttctctggcctccacccactggaagccaggggaatgcagaagaggcttgtttattctcccatttaatgctcaggacaatatctgacataaatgttatgtcttttattttataaatgaagaaaatgagactcagaaaggtttaagcgagtcacctaagaacacacagacagcaagaggtagaacccgaaactgaacacaggtgtccacatgagacaacaaaaaagttcagattccagcttcctttgagtctctcatttcaacaatggccatcatctgcatacgagctgaagtacaggaaagctgggctgaactctcctcccatcaggcctaggagccccggaccagaaccccagcccaaggtctcccagtcaggcccgctggagggagctggcatccacactagcatggtttctcaaagctacagggatgccagtctcgccgctgatgaagaaaatgaagggcatttgcttctcctgcaggctgtcgggatttaacacagattccttttcttgctctcttctcccgtagcacaaaactgggtggtccatccccctcccgctgtcccaaggctttgttgcgtgttctctttaatttctcccactctggcagtgcaccctaccctcgtctccctggcaaccattctgctctatcctctccacacctggatcacaagaacacttgggaggccccttaacaagctacatcccaaattatgattcccctttgtcctcagccagtgcccaggtccaacttgctctcctgaggtgactttctttcctgcccaatatggtttcctcatctgtaaattggggataatcgaagtcttgatcctgatattgggctctcaaagcagaagtagcaagctcagccaagtcacttaaacaagaggagacgttccttgtgaaccaaaagggcactggtcacaagggccgctccttctctcaggcctctccagcacacccttggctcagccaaagaagagactcaggctgtgcttctgcgctgtggggataacgtaagtacctggtccttgaccctgggactttaacagttccctcttgtggctcagttctacagcttcaatgacaaaaagtggcttttgctcaaaatagcctttgataggttaaggtactcctctgccactctaagtctgtgtggaacagacagggttttgcttcacagagaagatgcataaaatttggtcttaaaaatgagttcaccatgcacacatacacacgaaaaaagtaaatactgcattactgtatatatgaggttccaaaataggcaaaactaatttatggtgacagaatagtggtgacctctgagggtcagtatcgactgggagagaacagaagagagcctactggggtgctggaaatgttctgtatcttaattttgcaggataattccttggatgcatccctaaaaattcagtcaagctatgtagtaagatttgtacagtttacgtaagtaataggagagataagagggggaacctgtggagaagcagaacatttcaagatctagaaagcaacatttgcaagggtacacagtgttcagacagggaccaaatcatagaaactactagggcttgccatgctgaaacgactgacttcaaaccatagggcatacataccttccactgaagaagagcacctgagtgaaatgactagaggtgcatttcaaagattattctattggaaatataaagaacgaattggaggagtaggaggcaaatagtccaagggacagatgaagaccttttttttttttttttgagacagggtctccctctgtcaccctagctggagtgcagttgtgcgatcatggctcactgcagcctctacttcctgcgctcatgcaatccttccatctcagcctcccaagtgtctgggactccagatgtgcggaccacacctggctaatttttttattttgttgtagtgacgggaatctcactgttgtttcccaggctggtcttgaactcctgaactcaggcaatcttctggccttaacctctcaaagtgctgggattacaggtatgggctacagtgcctggccttattaaaatgttgatgtaataaatgggactacctagtgctgtgctttctccttaaaggagagagctgacagaataaaactagcagtaataatctggtaaattgtgctttctacagagtaaattttgtttgtctcatgacatttatgcaaatattcaaatgtttcaggaatataaacatttaaaatttgggttataaataatgcctcctggctctgaaattatctgaattcatgaagcaatcagtagtaaatatgaaggaaaaatgaaacacagccttatatgcaaggacaaacacaaatttctaattcttgttataatttgggtgcccacctggttttgaaggtgagccttggtttgactggttctgagacatttctctcaaatagcaaatgagtagtgggtatgaatagggtacattggaaagtcatgtcaaaattccatgtaatttttggagcgttttttctcccatgtaatttatataatttgacatgtgtattcctatgtaaaatatttaaccacttctctacaacaagcattaagtgggctaattagtatgctcttcttatttcatatttctgtgatttctcttatctggaatgacttttttatgccacccaggctggagtgcagtggcacatttactgctcactgcagcctcaactccccagggtcaagccatcctcctacttcagcttccctagcagctgggactacaggtgtgcaccactatgccctgctaatttttgtgtttttttgtagagacggggttttgctatgttgccccggctggtcttgaactcctgagctcaagagatccacccaccgcaacctcccaaagtgttgggattacaggcgtgagccactgcactaagcttcttttctaatttgtttttattctgagatcagatgagatcggcatgttcaggttggtatggccatagactgcttttatctattctaataattttgtattgtacaatgtgttggaaaggcaagatgaagttagattatgaagggttcatttccattcaattctgtctatccttctggacttggtgatttttgttgctttgtccaagaatacccaagtgagttatttgtccgtttttctgtatagacagcatgttttgtaacttaccatcattttgtatacataagttagactatttttatgtacccttttgtttagtcagattggtttgatcacttaatgtttgtacctcttgaggaaaaatttagttgggaaaatagtggtgaattcctgtgacactgctgtttgaacattaggagacagcaatcaaatatatgactgatggatgtttactgaaacatattctgggagacccaagtcttaccaaattcagagtcattattttggatgaagcccatgaaagaactctaactacagtgagtattttaatttattattattttttattagcaagtagtttgtttgggtagctttttattgtgtagagaattgcctcctcttactttttaatttaatttaattttttagagatggagtcttgctccatcacccaggctggagagcagtggcacgatcatagctcactgcacccttgaactcctgggctcaagtgatcctcccatctcaacctcctgagttgctggtactgcagacgtgcatcaccatgtctggctaatttttaagaatattttttgtagagacagtgtctcgttttgtttccctggcaggtctcaacctcctggcctccgaccttggcctcccaaagtgctgggattacaggtgtgagccaccgcacctggctcctacttatattttaatgtattaaaataggaattccttggttagaacagcagcgtatttagaatagtttggctgttaagtgtgcttgtgacttactagaaatttacttttctttcaggatatcttatttggtctattgaagaagctatttcaggagaagtctcctaataggaaggagcatttaaaagtggtggtaatgtcagcaactatggaattagccaagctctctgcattctttggaaattgtccaatatttgatatacctggaaggctttatccagtcagagagaaattctgcaatttgattggtccacgagacagagaaaatactgcgtatattcaagcggtattacttggcattcatttaatgtcttttttaaatatctatgattcttactaattgggtggtttgataattcatttgttcactactattttaatgacagtcctcacaggtcctagaacttttaagaaccaaatttaatttttctgtggggcaagggaagtggtggtaagggaatgactgtatttccactagcatattatgcctgcatttcttgctttagattgtgaaagtcaccatggatatccatttgaatgaaatggctggagacatcttggtttttctgactggtgagcattcagtatcaagttaaaaaacttaagtatttgtaagtaaggaatgtggcacccagatagagtgctacctctgttgggaattctgtgcccttctcaagtgttgccctagctttttctgattatctgaataattttaggtaaaagatagataaaaattgtaagctagctgccaaagaggattatatatatttatgtcaaagacataatagtatgtatatatattttatgtcaaagacatagtagtatatgtcaaagacgtaatagtgtatatgtatatatacacacacatatatgtcaaatgtcaaagacatcaggctcattagtaaatatatgtaaaacacactgaccttttaatagaaagaaattaaatagtgaaatattgttttttgttggtctgtcttagatagaaatgtaacctgactaaacagacctgagttaattccattatttcaaaggacatttcaccaggttcttctttgggtggtggcattgtactgtgtgataacaacacataaggtgtagaatctatgtgtcgtagacaagcatgtggcatttttggagatcaaaaataaaatagttaaatcccaaactagtggcataacttttcaaatagcagcaccctcctaataggaattagtagtttccttgtttacctttttcctctgccttgtactaatgtcagaagtgagggattgtcacaatctttgcctttttggagattacttaagtattttgaaatttaaccaaatgcaatagcacctggactagcttttctcctttgttaacaatttggtgagtcttctcaaatacagggtgaaaagcttgacgatgataaatatttttattcctttagagatttaggtttcttagaaactgatgtttcttctacttcgaattttattgttgaaatatggtacagcttatgtgttcatctcctttacattaaatgagagatttacaataacttttaggcaaaattaattttaatcttgacattttctttatttttaaattaatttttctgttcagttgctgaagttatttttttcttcccattttaggccagtttgaaatagaaaaaagttgtgagttactttttcagatggcagagtctgttgattatgattatgatgttcaagataccatcctcgatggcttgttaatattgccgtgttatggatcaatgacaactggtaatttctcattagaatagaaaatttgatttttttaaaaaactttttattgaataatcgtgtttacagaaaagcagtcagatcttaagtgcttaggtaagtttcacaaaccagtctcacctttgtaacccacatccagatcatgaaacaaatcagtgagaaccagcattccttgacagtagtgatttttgcctgaagtctttttacattcacttttttgagagtcgtggatatcccccttattatcgtttagagtattgtttctcccagcaaaacaaaactattggtgagaattctttgaaatgaggacagtagtttcttgctggtattactgtaagtcaaaacctaatttgccattgccacagaatttttagaaattgtgtatatccagctatatctaagtctaaacacagtggattgttttgttttttttttgtgatggagtctcgttcttgtcatccaggctggagtgcagtggcgcaatctcagcccactgcaaccgccacctcctgggttcaagcgattctccttcctcagcctcccaagtagctgggattgcaggcgctcgccaccacacctggctaagttttgtatttttttttttttttttttagcagagatgggattttgccatgttggccaggctggtttcaaactcctgacctcaggtcatctgcctgccttggcctccagaattgctgggattacagatgtgagccaccatgcctggctgtggatcattttccttttaaagtagccatgccttagtctgcttttcaagaatgatcctgttctttggtgaattccaagagcaaatgcaaactcttgatttgacattttggttatagtaaatattgttgaatgaggtttagaatttgttttataaaacttttattatggaatttaacttgtaaagttaaagggaaattaaccttagcctcctatttggagttggaattagcatttgaatgtttttatattttacatgtatgcgtattaacagcttttgttgattgggtgattcttatccctatattaacaaagttttggaatatatgtgtcagtaaagaacatagatgtgctattttggaaatcttttttatgatgatattagcttcttactctctattgaagcatagatatctattttagattttgtcatcttcagggaaattcttaggatcattgtttaaggttctcattgttttctcaagatttggttcaccgatgcttttataatttacattgaaactgataaaaacccattatgtttggtttgttattaatcattaactaaatatgtacatagacatatattattctatacagagtaaataatttcattctttcttactgctacattgaaaataatgttctggattttctcttgcctctgtttttttttttttgttttttgagatggagtctcgctctgtcgcccaggctggagtgcagtggcgcgatcttggctcactgcaacctctgcctcccagattcaagcaattctcctgcctcagcctcccgagtagctgggactacaggcgcgcgcccccacgccctgctaattttttgtatttttcttagagacagggtctcaccatgttagccaggatggtctcgatatcctgaccttgtgatcctcccgcctcagcctcccaaagtgctgggattacaggcgtgagtcaccacgcccggcctagaaacatgacttgtaatgaaaaattgagttcttcaaaactcgagtttgacacatgcatgttgtaaattggtattttctttttatatatacttcagatcaacagaggaggatatttttgccaccaccacctggaattagaaaatgtgtcatatccaccaatatttctgcaacgtctttgacaatagatggaatcaggtaaaacttttgaactttctcttaaagtcaaggaagcctatcgttactaaacattagctaaacattactgagtttgcttttctgtgccctccactaattcccttctctcctactttttgatgttcttaacatgtaatcacctattttgttttgtaattattgattgctttgagcaggaaatggagtaggaggtacatactatattcctattcacactttttgtttttttagagacagggtctcattatgttgctgaggctggaatatagtgactattcacaggcgtgcagtcatagcacactacagccttgtatggagatcagccaatcctcccgcctcagtctcctgggtagctgggaccacaggcatgtgtcaccgtacttggctgttcacactttttaactacttggcaacttgaagcttcttttcaaatttaagattatgtataatgctttatgggtttcactaaataggaagccaaacctatttttctgtactcccattataagcatataccttagatgatttgatatttccttctaccttgcagcctcactcggtagagttagtttgtatatccagtgtttatctggatgtattgtctctgactttttacctttttgtgaaaattaactatgattcaggtcccttatcttttctggatgtagtaaatagtgctatcaaatttttgggtaaatttagtaaggaaacactaagaaattttaagtctggactgacaactaatgcaaagttctttaagactgggttatttatcatttaccgaatatattttatttctttagctaagtctgattgtctgtctccggaaggctgaacctgaatctcaaagatcctgtgtgtttcttctgggtaaaatgatcacccaggtctgagaggaagtctaatttcctctgcttttcttcgttactttaaaaataatggtttcactaagggattaagggagtgctctcctgggtaaattaacctctgtaattttctgtttcctgcacaggcaaaagccattaaatagcatgtttcagaatgttgtcttgttactgctatcctactttggttccttacctgacttgttcaccatttaattggcttagaatggcatgttaagggctagttgaaattagattctgaatctgtttaaatggtctgaagctgactttcaagtttgtgtatttttgtattgaggcaaaattcacataaaattaatcatttaaaatgaaaaattaagtagtacttagtacatttacagtattgcgcaaccactgcttctgcttagttctaaaatatttcaacacctcaaaataaaaccccatacccattaagcaggtactccacattcccctcttgaccccagcccttggcaactaccagtcttactttttgtttgtacgtattttcttttttaaaaaattctttagatgtgtcagcaggaagcagtaggtattttctattctggatatttcatacaaatagaatcatataatatgtggccttctgtgtttgctttctttcacttagcataatatttttgaggttcgtccacattgtagcatgtatcagtacttcattcttttttgtggctgaataatattgcatagtgtgtgtgtgtatatatatatatatattccattgtgtgtgtatatatgcgtgtgtatatatactacatacatatatgcaaagcaatttgttcatcccttcttccattaatggttaatggacatttaggttgtttttaccttatggctgtgattcatagtgctgatatgaacattggtctataagtatttgtttgagtacttgttctcagttctttttggtgtacacttagaaatggaattgctggatcatatggtaattttgtgtttaacttcttgaggacctccgaacaattttccacctcggctgaaccattttacattcccaccaacaacatacgagggttccaatttcttgactttcaagttttacacttaacataaaaggcattgtgtacctgctagtttgctagaaaaggagaaaccaaagtggttaacaattaacaagtcttcttttattttccagaaacttaacttgctttgattcttcttagatatgtggtagatggtggcttcgtgaagcagttaaatcacaaccccagattagggttggacatcctggaggtggttccaatttcaaagtaagtctctatgtcaaatctttttattcaaagaacaactgattaggtaatttctagctgttttggggagacaaagtaaattacctgagaaacccacagaacattttggggaatttttgggtttttttccttttgtaggagcgaggcattacagcgaagtggccgagctggcaggacttcttcaggaaaatgctttcggatctatagtaaagatttttggaaccagtgtatgcctgaccatgtgatccctgaaattaagagaactagtttgacatctgtagttctgaccttaaagtgccttgccatacacgatgtcataaggtatgtagacaactagaaaaaaaaggaaaaacttgttagcctggaaccaagttattggctcaaaaattattttgaaatatttgactgatacatccctgagagttgaggctaacctcttttacaggttggtttttatattggttgcttttcttttctttttttttttttttttttttttttgagatggagtcttgttccgttgcccaggctggagagcagtggcacgatcacggctcactgcaacctccgcctcccgggttcaagcaattctcctgtctcagcctcccgagtagctgggactacaggtacctgccaccatgcccagctaatttttgtatttttagtagagatggagtttcaccttgttggtcaggctggtctcgaactcctgacctcaggcgatccacccacctcggcctcccaaaatgctgggattacaggtgtgagccactgtgcctggctctattggttgcttttcaactaaactaacacagaagacttccttgcattgctttagtaggatctcttgctcatgtttaaccttggcttaatggcggggttagggggttgtgctgatgtttatgtggatcacttagtgaccactgtttatttgtaatgaaaggtatataatgagctgggcataacagcttatgcctgtaatctcagcactttggatggccaaggtgggagggttgcttgagcctaggatttcgagacaagcctgggcaacatagtgagaccttgtctctacaattaaaaaaaaaaaaaagtctgatatggtgcatgcttgagtcccagatatttggaggctgagacgggaagattgctggagccgggcaggtagaggctgcagtgagccatgattgcaccactgcggtccagcctgggcaacagagtgagaccctgtttcaaaagaagggggctgggcgtggtggctcacgtctgtaatcctagcactttgggaggccaaagtgggcggatcccttgaggccaggagtttgagacccgcctggccatcctggcaaaaccccgtagctactgaaaatataaaaattagctgagcttggtggcacgtgattgtagtcccagctactccggaggctgaagcacgagaatcacttgaacccaggaggcagagactgcaacgtgccaagatcacaccactgcactccagcctggtcaacagagcgagattctgtctcaaaaaaaacaaaacaaaacaaaagggtatacagttggaaagtggagtgttttttttgtatggccagcatcatactatataccatgaaagacagagtaatactctgtagttttttgctttcactaagcttaagttatattaggaaaacaaggttcagacacgtgaaataaaggaagaacagttaaattagccaaatattaatataatttattggtataagatagaatattgttatagatagaaatttctatcatacatggtaggggaattaatggaggaaagtactatcttctttattttggtcttaattgccttggaatgtaaaactgctcaggaattttgggggatggtaaccgtgcagtttttaaattcatagtaagtgattattaggtgcatccaaatatgtattgtaggccgggtgcggtggctcacgcctgtaatcccagcactttgggaggccgagacgggtggatcacctgaggtcaacctggccaacatggtgtaaccctgtctctattaaaaatacaaaattagccaggatggtggtgctcgtctgtgatcccagctacttgaaagcctgaggcaggagaattacttgaacccgggaggcagaggttgcagtgagccgagattgcgccatcgcactccagcctgggcaacaagagcgaaactctgtctccaaaaaaaaaaacaaccaaaaaaagcaaaaaaaaccccaaaacccacaaatactcattgtatactcttggaaagccaatttgccaatttcaaaatgttttgatagttatcattagactagagattttctgaatgagaatatgtagatactggaaagagaaaagcatgtaataaatgaaattctgactgtagcaataaattataccaatgaaaagaaggaaagcgccatttaaagaaatccaaagagcccaatagaaaactttcagatgaacccagatattaaaataatgtcttgatttttttcatttggggaaaaagggccatttttggaaatagctgctcagtaagtttgacattgactcttagtatattcacaaaggatagcagagcagcctctaaccaagaatgagtatatattagaaaaataggaacaataattaatatcatctgcattgaattatttttccatcttaagtcttaaaagccatagtgtactaaaaatcgcaaaattttgtttcaaaatgcttgaaacaaaaaacaaagacttcctttttaaaaagttgtataaagaataaggagaggtagagccagtgtttggggtagatggtataggattcatagacgacagaaagaaaatggaccttctcaattattattttgctttccctttcttttccatcaggaagaataattttaaagctgaaaatgcaagaacaggtctgaataagaaggaattgatgactaaggtggaaggaaataatgagggaaaacctaccaccataagtgattttgtcttgagcatttagacattatttccgtggtgttaaaagaacttgcagatttagcgtcagagtcactgtaggtcatctatgagaaattatgcagaatacgttatcagaaaatggtgagaaaggcaaaagtcttaatttttttcatttggtaaaaagggcgggttctggaaacaactacccagtaagcttgacattgattactagcgaactctagtacagtttattgaaaaatggtttaaggaaatttaatgacgattaatgagtatgaattttaaaagttcacaatgaatatgtcattttttgttgttgttgtgtttggttttggttttctgaggcaggatctcactctgtcacccgggctggagtgcagtggcacaatctcagctcactgcaacctccacctcccaggttcaagcgattctcgtgtctcagccttctgagtagctgggattacatgcgtgtgccaccatgcccggccaaatatgtcattataagccatttccttttcagtttgaggacaggaccgtccacataatgggtgctccacaagaatttattgaaatttaacctaatgtcttttattttcagcacagtatttaacaatactgcatttgatatcttgtgaataaaaaagtagtctgtagatgacagtactgctgagtatagttgccagatagcccagtctagaaaagtattaattaattgcttagtgtagactagatgaagtttttactggtattgtgctgaacttagttttttcttgataaacatttttaatgatactgaataaaaatattgaagttatgattatatttttctggaaaatatcttaatatctaataggtagatgaccaagctttaaaatgactttaacagattagaaccatgggcaaaaatcaacagggtgtaaatttgaaaggatatatcttatatcctgtgtttgggatgtacaatagcaaatacatgtggtagagatctgaaattatcagatcatcacaaccttaatattggcttatacgtatggctctgtttaaaaaatttttttttaggccgggtgcggtggctcacgcctgtaatcccagcactttgggaggccacagtgggcggattgcgaggtcaggagatggagatcatcctggctaacacagtgaaaccccgtctctactaaaaatacaaaaaattagctgggtgtggtggcagacgcctgtagtcccagctactcgggagactgaggcaggagaatggcgtgaacccgggaggcggagcttgcagtgagcccagatcgcaccactgcactccagcctgggcgacagagcaagactctgtctcaaaaaaaaaaattttttttttaattccactggcatagactttggttacattaataaactaggtgatggggaattacagcattcctgttatgtgttggtcactcaacatttggagttcagttttggatataatcaagttttatgaggagtttgacatactagtgtttttagagaatggtacttaggtatggtagatctcttagaaaccaagtaacttataaggagtggttgacagaattggtaattggaggaatcaaggggggaaattaattgcaatattttagaataagtagtttttccttttatatagaagaagcagctgactggtttggtattgctctagcacaagggtggcaaactgtggtctaatctcactgactgtttttgtaaataaaatgttagaatgcagccatacccatttgtttatgtgtggctgctttcactgtaatagcatggttgagtaattgtgacagagaccatatggcctgcaagcctaagctatttactatctggccctttacggaaaatgtttaccaattcttgctgtagaagctaccaggacctattggtacaaattgtaggaaagctggcagtagaacagtgtaagagattattgtttgcttattattttttctttttataagagatgggatcttgctgtgttgcctaggctgttgtcaaactcctgagctcaagcagtcctcctgcctcagcctcccagagtgctgaaattataggcgtgagctaccatccttggccttgttttatttatttatttttaaatagggttatcaatcctggaatggacattttatataaggtattggaccttttgtcttctattggatttttttcaaggtgagaagttggagtagatgatttttcatatccagatttaaggtggaaaaaataacccagtgcagatgatatcaagtaattatttttcctgtttttaaaaaatatatattcatgtttgatgatgctatcccttttgaatattattgttaattgttaattttattatatttattaatagcgcattatggtgatgtaagagaatgtccttattttcaggagatgcatgccgagatagttgtaagtgtgcaatggcattgtatttgcaacttattctgagatagtttggcagaaaataagtacatacacatgtacacatatgtgacacaaatatggctaaattaattgaatatatttccccatttatatgaaagcattttgtccggccgggtgcggtggcttacgcccgtaatcccagcactttgggaggctgaagtgggtggatcacctgaggtcaggagtttgagacaagcctgaccaatatggtgaaaccccgcctctactaaaaatacaaaaattatctgggcatggtggcaggtgcctgtaatcccagctactcagcaggctgaggcaggagaatcacttgaacccaggagacggaggttgtagtgagccgagattgccacactgcactccaacctgggcagcagagtgagactccgtctcaaaaaaaaaaaaaattaaattgtatttaagaagcattttgaggctgggtgcggtggctcacgcctgtaatcctagcactttgggaggccgaggtgggcggattgcttaagcacaggagttcaagaccagcctgggcaacatggtgaaaccctgtctctactaaaatacaaaaaattagctaggcgtggtggcatgtgcctgtagtcccagctactcgggaggctgaggcaggagaattgcttgaacctgggagatggaggttgcagtgatcagagatcgtgccattgcactccagcctgggcaacagagtgagactccatctccaaaaaaaagcattttgaggtactattgaacaatttataattttcagtactaattaatatttctctactattaatacttctctactattaatatttctctactatttttataaaagtttggaaaaaaattatggactgcagaaaagagtagacttgacataggctgtgaaggatgggtggggcaggattaggataagtagactggtgagagtatttcagctaaggggagtcaaaaagaatcacttcttgaagtagaggagtgtgattcagaaaaaaattatttcctcttttgccaaatgctgatcatgatcatataatttttttttagaaaaagatgacttgaaaaatagaaataaaaccttttaaagaaattttcgtcatatctatataaaatcctaccatgttcaaggaatgcctctcacttcatatcttatttaaacacacaggtttccctatttggatccacctaatgagagacttattttagaagctcttaaacagctttaccagtgtgatgctattgacaggtaaaaaaaaaaaaaaatcacaatcaaaacagatattgatctccttttaaacagggctctaaatacctttctctaacagtagaaaataatttctttaaattgaatggattgttagtctttcatcacaattctgattgaaaaaccagccgggcgctgtggctcatgcctgtaatcccagcactttgggaggccgaggtcggtggatcatgaggtcaggagatcgagaccatcctggctaacatggtgaagccccgtctctactaaaaatacaaaaacaaaattagctgggcgtggtggtgggcgcctgtagtcccagctactcaggaggctgaggcaggagaatggtgtgatcctgggaggcagagcttgcagtgagccaagatcatgccactgcactccagcctgggcaacagagcgaaactctatctgaaaaaaaaaaaaaaggagaaagaaactacacgatataatcccttttgtttaataaatattggtattatttaacaagtaatttctgagtaccatttcagtgccaagcattatgctggatacataaaaatgataagagagccagagtccttgttttcatgtttgtgtgatggggtggttaggtttgatattaataattattattctcttggatgtgcgtggtggctcacgccggtaattccagcactttgggaggccaaggcgagcagattgcttgggcccagttgttcgagacaagcctgggaaacatagtaaaacccatctctactgaaaatacaaaaattagccaatggtgttggcacacgccagtagtcccagctactcgggaagctgaggtgggaggatcgtctgagcttcggaggtgaggggtgcagtgagctgaggagattgcgccattgcactccagcctgggagacggagcaagaccctgtctccaaaaaaaaaaaaaaaggtaaaatttaaaaaataaaattattattctctcatgtcttcaaagacatcttcctttttttttttttgagacggagttttactcttgttgcccagactggagtacaatggtgcaatctcacctcactgcaatctccacctcccaggttcaagcaattctcctgcctcagcctcccaggtagctgggattataggcatgcaccaccatgcccaggtaatttttttatattttggtagagatagggtttcaccatgttggtcaggctggtctcaaactcctgacctgaagtgatctacctgcctcggcctcccaaagtgctgggattacaggtgtaatccccctcagcctccttagtagctttgcaacctttgcctcccgggtttgagtgattctcctgcctcagcctcccaagtagcagggactacaggcgcatgccaccacacccagctaatttttgtgtttttagtggaaacggggttttgccatgttggccaggcaggtcttgaactcctgacctcaggtgatccacctgcctcagcttcccaaagtgctaggattacaggcatgagccaccacgcctggcctaattttcttaaattgaattgaacttctggaggtgattggaggtaatgtaaattatatctgatttattctgaatgatgaatgttacatttgtactctcctagtgtagaaagacttacaaactttttctttgtattaaggagtggccatgtcaccagattgggtttgtctatggtggagtttcctttgcctccacatctgacatgtgcagtaataaaagctgcttccctggattgtgaagatttactacttccaatagcagcaatgttgtctgtggaaaacgtcttcattagacctggtaagatgtttattttaagttgtgttttttaaaactaatagacttggctgggcacggtggctcacgcctgtaatcccagcactttgggagggcaaggcaggtggattgcttgaggtcagaagttggaagaccagccttaccaacatggtaaaaccccatctctactaaaaaaaaaaaaaaaaaacaccaaaaaaaaaattaatagactttattttttagagcatttttaagtttacagaaaaattgagtagaaagtacagagggttgacattcatcccctcaacctcccacagcaatttctcctattaacatctttgatttgtatgacatataagttgcaattggtgagccaatattgacacattattattaactaaagggatcactctttgtgttatatggttttagctgggattataggcatgtgccaccacgcctggctaattctgtatttttagtagaggcgcggtttctccatgttggccaggctggtctcgaactcctggcctcaggtcatctgcccgccttggcctcccaaagtgctgggattacaggcgtgagccagcacgcccagccgggttgttttcttattgttaagaggtctttgcatattttaaatagttatttaacagatagatcttttgtaaatattttctcccagtctgtggtttatcttctaattgttttgacattgacttttgcagagcagaagtttttatttttgacgaagtctaccttatcaattatttctttcatagattgtgtctttattgttgtatctaaaaaagtcattgtcgtacccaaagtcatctagattttctcttctattgtcttttagtatttggacgcacagttgttgcggtaccatttgttcaaaacactgtcctttttctgttgaaatgccttcgcttctttgttaaatatcagctgactattcttatatgggtctgtttctgggctctgtatcttgttccatttatctgattgtctgttcttccaccaataccacactgtcctggttattggagctttatagtaactcttgaagttttgttcttcctcttcaaaattgtttaggccattctgggtctttttcatataaactttagaaccagtctgttgaaatccacaaaataacttgctgaacttgctgggatttttttttttttttttttgagatggagtcttgctctgtcacccgggctggagtgcagtggcctgatctcggctcactacaagctctgcctcccagattcgtgccgttctctcgcctcagcctcccgagtagctgggactacaggcgcctgccacaacgcccggctaattttttgcatttttagtagagacagggtttcactgtgttagccaggatggtctcaatctcctgaccttgtgatccacccgcctcagcctcccaaagtgctgggattacaggcgtgagccaccgcgcccggcccttgctgggattttaattgggattatgttttaattaagatagattaagttgcgaagaaatgacatcttgacagtattgtcttcctatccatgtacatggaatatctcttcatttatttagattgccagtaattcattgagcatttactgagggtttaccgtgccttagccctaggacagaaaactaaggataaacaagttttgttgttgttgtttttgagatggagtttcactcttgttgcccaggctggagtgcaatggtgtgatctggactcactgcaacctcctcctcccaggttcaagcgattcttctgcctcagcctcccaggtagctgggattacaggcatgggccaccacgcctggctaatttttgtatttttagtagagatggggtttcaccacgttggtcaggctggtctggaactcctgacctcaggtgatctgcctacctcggccttgggattgcaggcatgagccaccacgcccagcccggcgttaatttcctttcattagtaaaggaagatagtgcttttatagtacattagtaatttactaattttttttttgtaggatcaaaagaaaaggtagtttagcccttgcatccttagagaattcttttgaagtttccaggtctttaaacttctgcttctttcttttcttggtgtgtcagtataggacacaatttaatttgacatatgttagatttgttttcatgcagtggagtaattttttctttcaaggagcttccaagtgaacagtataccttgtctgcagccagacaacagaatgggttagctcactggctttatacctttgtaggctggaagtgtcgggtccagattaatttattattgccatgattataatggaggatacatttttctataaaaatactctaatcaatatactgtttcaaatagtttgcagtctttttttttttaatttaaaaaatttttaaattttattgagacaaggtctcactgtgttgcccaggctggagtgcagtggcgtgatcttggctcattgcaacctctgcctcccaggctcaagtgatcctcccatacctcagcctccccagcagctgggaccacagatgcttgctactatgcctggctaattttttgtatttttatagagatggggtttcactctgttgcccaggctggtctcgaactcctgagctcaagtgacccaccagccttggcctcttaaaatgctggtattacaggcctgagccattgcacccagcagttgcagtctgaagtgtcagaattttaattctggtaatacccctaattgcaattttttgttctaataaaatgctgtataaaaataagtaatgttaactggttttcatgaggcagtatcagagctaaaaataccagtgggcacagtggtatcccagctccttgggagactgaggtgggatgattgcttgagcccacgagatcagggccagcctgggcaacatagcaagaccccatctctgataagaaattaaaaaataggccaggtgtggtggctcacacttgtaatcccagcactttgggaggctgaggcaggtgggtcacctgaggtcaggagtttgagaccagcctggccgacatggtgaaaccctgtctctactaaaaatataaaaattagccaggcgtggcgtgcacctgtgttgccagctactggggaggctgaggcaggagaattgcttgaatccaggaggcggaggttgcagtgagctgagatcgtgccactgcactccagcctgggtgacagagtgagactccatccccaaaaagaaaaaagaaagaaagaaataaacaagctaaaatatttcaaaacctattacagagtattgaagtaggagttaagagtgcagggttctgtccagctccactactacctaattatctgaccatggccctagcttttctagatttcatttttcatttgtaaaaccaagaagttggattaaggtgaccaactctaatagtcttttaaggctagaaaaagaaaaatgttttttccatgttggaatatttaaatagataaaatcagtgtggtgttagccttttttgggtgacatttattcttatataatttcaaataagaatagcaaaggaattcctttataccttctatgcagtttccgcaatttttaacattttaccccctttgctttattactctgtctccctctatatatgtatatataaacagatttttttctttttctgaatcatttaagaataaattggaagcattgtgctcccttaccacaaaatatttacatctgtattaggcaagaacaagggcaatctctcatttaaccatagtacattaatcaaaattaggaaattgttttgttttgtttgagagagagtctcactctgttgcccaggcagttagtgcagtggtgggatcatggctcactgcagccttgacctcccgggctcaagcaattctcccacttcagcctccttagtagctgggaccacatgcatatgctaccatgcctgactaatttttaaaaattttttgtagagatgaggtctccccatgttgcccaggttagtctcaaactcctaggctcaagcaatcctcctgctttggtctcccaaagtgctgggtttacaggtgtaagccactatgcccggcctaaagtttggaaatttaactttgatacaatattactatctaatccagaatccatattgaaattgtccattttccctagaatctacagaaagtagtttgagaattggtaagttatagtactgtgaaaaacaaccctatataactacagtttgatatttgtttacagttaattttaggtaaaatttacatatagtgaaatgcataaattttaggtgtataattcaatgaattctgtaaaatgcttatacccatgtaacccaagccctgtcaatatatagaacatttttatcactagcaagttccctcagtgccacttcttagtcagatatcactctacctacctttggttaaacacttttcttatttttttctgattagtttgcctcttctgaaacgtcatataaatagaattttttttttcttttgagacagagtcttgctctgtcatccagggtggagtgcagtggcacaatctcggctcactgcaaccttcacttcctgggttcaagcagttgtcctgcctcagcctctggagtagctgggattagaggtccccgacaccatgcctagctaatttttgtattttcagtagagacggggttttgccatgttggccaggctggtctcgaacccataacctcaggtgatccatcagcgtcggcctcagccttccaaagtgctgggattacaggtgtgagccattgtgcccagcccaaaacttcatataaatagaattatacactctcctttcttgtgtctggcttctttcagtcaacataatgtatgttaaggtttattcatattgttgtatgtatgaatactttattctttttattgttgactagtattccactttatgaacatacagttgtgcattatcctgttgatggacatttgaattgcttcttgtttagttctatttttgagtaaagttgttttgaacattcttgcacaaaaatttgaaggtgtttattttcatttttcttagataaggtaaatgcctaagaaagaaatttgctgtgccatcgagtaggtatatgtgaatctttaagaaactgccaaaccttttccctgaacagttgtaccatttaaaaatcacatcagcaatgtttgagagtacagcttgcactaaacacccctctcaacatttggtattgccaatcattttattttacacattctattatgtacctctttgtggttttaatttgcattttcctgatgactaataatgttgagcacttcttcatgtgcttattggccatttttctgtcttcctttgtgatgtcttttaaaatattttgcccatgtctttttatttttgagacggagtcttgctctgtcgcccaggctggagtgcagtggcatgattttggctcactgcaacctccacctcctggattcaagcaattctccttcctcagcctcacaagtagctaggattacaggcttgcatcaccatgcctggctaatttttgtaattttagtagagacgaggttttgccatgttggaggctggtctcaaactcctgacctcctgacctcaggtgatccgcccaccttggcctcccaaagtgctgggattacaggagtgagccaccatgcccggccccttgtcttaaattaaaacaaaaaaaaaaaaaaactttaattcgtggattctttcttctgccagcccagatctactgttgagcccctctatggcagtttccattttgtttcttgtccttgtcaactccagcggtcagtcagtgattggtcggaggttgtacctagctaagccttttaatttaagccagtgatgttttcaccttttactgttgaatctgtgtttctggttaggagactactttcatggttgagggagttgatgaatttgtactgtgttcagccaaggagtagaggctcagacgttccctctctatttacttctcagaaggcacagctttgggcatgagaacaatcttctagaacaccaggaagactatgctcttagcaggtctctgtttccttcattgatttcttcattgaatttttggctggtctgtctctattggtgtcacagcaagctgttagtctccactgattgctagctgctggctctgttgtttttgacagtgcccagagcataaattgctccatagtcttgatccaaataaagttgggcacctcggcaggggcaaggtattgcccgtctttgataatcctttccccatcctttcctggaaacaatctctgtgctatggagcaggagttggagagggtggtggtggtaatgggggcctgttcttcagtggctctcctatctgggtcctccctaaatagcagaagcttggggttggggagttaggagctgatactgtggctcactttgcatcttcctcagcacaaagccttttgagatgcaatctctggatgttcactagttgcaaacatacaaacctggaatagctctaggaaactgggagtagtgggaactaccactgagctgctgaacccattggaacaactcttctgcaacacagagctgtggggaatagaggactgcgtaggctgtcattagctgttatgctttgatcttccctaccgagtagcatttaggagtcagggaaagggtgccgctttcaggctgccttgaaggctctcgcatagcccttccacacacacagctgttgagagtggggcattcttcctactgtccttaccgaattccatagattaggcttgtcttaagcattttaatcaatctccagagactttgaatgattgtctttggtaattttgactagtttaatagatgtctctctagaaaagaagttttacctaactcctcacatcaccattcccaatacagttgacccttgaacacacaggtttgaactgtgcaggtctacttatttgtagattttttgtttttttgtttttttttttttttttgagacagaattttgctcttgttgcccaggttggagtgcagcggcacaatctcaactcaccgcaacctctacctcccagattcaagcaattctcctgcctcagcctcccgagtagctgagattacaggcatgtgccaccatgcccagctaattttgtatttttagtagagatggggtttctccatgttggtcaggctggtctcgaactcccaacctcaggtgatcctcctgcctcggcctcccaacatgctgggattacaggcgtgagccatgcactcggccaattttttcaataaatatattggaaaagtttttggagatttgtgacactttgaaaaaactcacagatgaactccgtagcctggaaataccaaaaaaattaagaaaaagtatgtcatgaaaacataaactatgtgtaggaaatgctgcaggataattaaggaatcagagagaccgaggggttgaggaggagttatttaattatttaggtgcaccaacccagttggattaacatccaaaggactgagccctgaacaaagagtcaagctaccttttaagcatttcgtggggcggggggagatctgtgcagggggaagcatattacagaagtgagaaacaaagacagttatttaattaagacgtgcattacattatttcttacttttcaaggaacaacatgttttacgacttgagattatctgtctagtgaccttgaagctgcacagctcgagagtcttcacaatgcctgggaaggggtgagataaggctcactagccacagagagaaaaacaggcagttaattttaaaggactccagctctttctcttcctcggggaattgggttttcttacatacaactgagtttttgcttataaagtctttaatttcttttaattcctgttccagtactagtctgttttataatttactaccataaaatatacacaaatctattataaaaagttaaaatttatcaaaaatgcatgcaaacacagactgcatggtgccatgattctagggattccaggaggcactgactcacaggtaggcttttctcctggtattgcgagccaggatggggtcgatgctggagtctagggcaatttgacttttggcatgatatcttctgggggatggcagttaggtgcttaaaatgaaatattttgggttaaaaattagtatccctggctggcgtgttggctcaagcctgtaatcccagcactctgggaggccagggcaggcggatcacctgaggtcaggagttcaaggccaacctggccaacatggtgaaaccccatctctactaaaaaatgtaaaaattatttgggtgtggtggtgtgtgcctgtagtcccagctacttggaaggctgagacaggagagtcacttgaacttgggaggtggatgttgcagtgagccaagattgcaccactgcactccagcctgggcagcagagcgagactgtctcaaaaaacaaaacaaaaaacaaaattagtctcccggagcagttcaagaaatggagattaataatcatttatatcttttccttaccagggtcatttgtatgtttgtatggtctgagataaatcgtattcttttttttttttttgtctctagctgcttcattcagttgctacctaggtaacatagttggaagctacttaaagcatgggatagaagactttataccttcatcagtgttttctttaatcaaattactttcctcctagtaacaggaactgctgctttgcagtttcacatcgtattctatagtaaatgctgctccctggattcaggcaacattgtgcctctgctagatctagctgtgataggtatagggaataggaattgtgatgtgacgtgttagattgaaggaaaggatccctatgcagttttgaaaaaatggcactctgaaagattagccctggataaagtgctgtatggggaatttgggcaatcagagagcacatgagtcctgaatgggatcaggggaagtggtatcgaagtaattaacagataaatctcaaaaacgtaatgttgagcaagagaaaacagacacatcaagtacatactatacgattcatttatacaaaggttaaaaatgggcaaaacccatctgtaggattagaagtcaggatatagttattcttgtggaagggaatgggtagttactcgaaggagggcataaaagggggctgttgagatgctggtgatactgtttgttgatctgggtacattggtatgttgtgtttgtgaatattatatgagctacacacttacgtcctgtgtaattttctgtatgcatattatacttcaatattacattaaaaaagaaaatgttcgtagtaggtcagttctgcatatatggagatcatgtctaattgcccataattgggaattggataaataagaactggttaaattgtgttatgttccccatactcctggggaataccatatcattgtttttttctttagacaaggtttcactctgttgcccaggccaaagtgcagtgatgcgatcacggctcactgtagcctcaacctcctgggcttgggccgggcacggtggcttatgcctgtaatcccagcactttgggaggccgagacgggcagatcacaaggtcaggagatcgagaccatcctggctaacatgtgaaaccccgtctctactaaaaatacaaaaaattagccgggcgcggtggcgggcgcctgtagtcccagctactcgggaggctgaggcaggagaatggtgtgaacccgggaggcggagcttgcagtgagccgagatcgcccactacactcgtctgggcgatagagcgagactccgtctcaaaaaaaaaaacaaacctcctgggctcaagcgatcttcccacctcagcctcctgagtagctgggactacaggcatgcatcaccatgcctggctaatttttgtattttttgtagagacaggatcttgctttgttgcctaggcttgtcttgacctcctgggctcaattgatccacttgccttggcctttgaaattgctgggattacaggtgtgagctaccacacctggccctatattgctgtttttgagagagaataattttatgtgtactgatatggagttgttattaaataaacaaattttcagattatatgttccatttatagaaaaatgaaacattatgtacatatgcttatatatacatagaaattacctggaaggacacacactaaataatgaacagtactttgccttgaggattggtttatgggtagtgtgactggggaacattgaacttttacatgatattcttttataccattacatttttttttctgtaagcatggattactcttataacaaaactaatttaaaaagtaaattacaaatactatttttaaaaggcaaatagattgggagaagtgatgttgctattcaggtaaaatctccaaagtgatatgaaaagaaaaaaaggaattgtgggagaaatagagcttcctaagagaagttaagaagagttaatatagttctaccttacttcaccccagaggatgaggcagattttaatgagtttctgaaagcaaagtgattgtaggcacttaatgcaaagtataactgaattgcctctccaattcttttagttgatccagagtaccagaaggaagcagaacagagacatcgagaattggcagctaaagctggaggatttaatgactttgcaactttagctgtcatctttgaacaatgcaaatcaaggtatgtaaggtagtcctttgtcctgaaaaatgtcaatttgatgtgtagttccaatacgtacttatgatgtggcttgtgacactaacgttcagtgaagatgatattgacttcaaggtattttgaatttcagtgaaattatctatgtcagatgactattgcttagtaggcatttattatataacattgattctcttgtttcctcctcaaacctttactgaaaatgaccttgtagaattttgcttctatataggtagcctagattaaaaaatgattggatatttgttattgcatatataagtaaagaaatccatttacaaattattttttaatttagtcaggggcacattcattaatttaaatgtttttttcaagtttcctaaaattcttttttagtacttggacaggtctcctgaaggaactgacagttgtttatgggtttccacttttgtaatagaaatgagaattttagattgtcttttacttagagaagatattttaaagataccagttttttgttttgcagtggagctccagcttcatggtgccaaaaacactggattcattggaggtgcttattttctgcatttcgtgtggaagctcaacttcgagaactaatcaggaagcttaaacaggtgattgccataatgttttttttcttgagtagcattttggacctatatatttcatattgaagtttcattgatgtacattagcaccctttctattctaccacccttccattctatttgtttctatgacctccttgaccccatgaaacattcctagtagtgataaaagaattgtcttcacagaaatgaagatatttaaaaattgctttcctgatatataattgacgtgtgataacctacacatatttaatgtatacactttgatgagttttgacatttgcgtaaaacaactatcaagataatggtacatatccatcatctcccagttttctcatcctcccccccacccttttttttttttgagatggagtctcactctgtcacccaggctgaagtgcagtggcgtgatctcggctcactgcaatctccacctcccaggtttaagcaattcttctgcctcagcctcccaagtagctgggattacaggcttgcgtcaccacacccggctaatttttgtagttttagtagagatggggttttgccgtgttggccaggctggtctcaaactcctgggctcaagtaatccacctgcctcggcctcccaaagtgttgggattacaggtgtgagcccccgtgctcagcctgttggtgttttgttttgtttgagacagggtctcactctgttgcccaggatgaagtgcagtgatgcaatatgggctcactgcaacctttgcctcctggattcaagtgattctcatgcctcagcctcctgagtagctgggaccacaggtgtgtgccaccatgcccggctaatttttgtatttttagtagagatgggcttttaccatgttgcccagaccactctcaaactcctgagctcaaccaatcctcccaccatggcctcccaaagtgttgggattacaggtgtgagtcaccgcacctggccacaaatagtgctttgtatccatgggttccacatctgtggtttctgcatctgtggattcagccaaccaaggactgaaaatatttaggggcaggccaggcatcgtggctcactttgggaggccgaggtgggcagatcacttgaggtcaggagttcgagaccagcctggccaatatggtgaaacccagtctctactaaaaatacaaaaactagctgggcatggtggcacacacctgtaatctcagctactcgggaggctgaggcaggacagtcacttgaacctgggaggcagaagttgtactgagctgagatcatgccactgcactccagccttgtgacagagtgagaatccacctcaaaaaaaaaaaaaaaaactgggggagtggataaaaggatggttgtgtctgaactaaacatgtatagactttttttccttattattccctaagtaataatagtataattactatttatataacaattgctttgtattaaatattttaagtaatctaagatgatttaaagcatatgggtatgcatagattatatgcaaatactgcatcattgtatataagggaccggagcatccatggattttggtgtccacatggggtcctggaaccaattccctagagatactaagggatgactgtatccactcccttctcggatgaggaaatggtgactgagcatttattattctcttaagtttgtacttgtgcgtatgtgggtgactatataggtgtccccattttcacagcaatatctgaagctgtaagattcataaagaagtagcagcttgcctgtaaagaaagcctacagaagtggggaaatcagtagaatatgaaagtttagggaagaaagattccaggaggtgggaacaacctatagcgtagaatgctgcaaaaatgtcaagcaggatgaggtttgaaaagtgtccattcattcgtttattccataaatatttattggccacttagtatatgccaagaactatattaggcattagatacagtaataaacaaagccaggccgggtgcagtggctcatgcctgtaatcctagcactttgggagacagagtcgggcagaacacctgacattaggagttgagaccagtctgaccaacacagcaaaaccccgtctctactaaaaatgcaaaacttagccaggagtggtggcacatgcctgtaatcccagctacttgggaagctgagtcaggaaaatcacttgaacccaggaggcagaggttgcagtgagccaaaatcacaccactgcactccagcctgggtcacaaagtaagactccgttgcaaaaatataaaaataaaaacaaagcacatgttgcccagtggcttccggaagttcctggtccacaacgtcaaggagctggaagtgctgctgatgtgcaacaaatcttactgtgccgagatcactcaccatgtttcctccaagaaccgcaaagccatcgtggaaagagctgcccaactggccatcaaagtcaccaaccccaatgccaggctgcgcagcaaagaaaatgagtagacagctcgtgtgcatgttttctgtttaaataaaagtaaaaactgccaaaaaaaaaaaaaaagaaaccctgtctctactaaaaatacaaaaattagctgggcatggtggtgggtgcctgtaataccagctactcaggaggctgaggcaggagaatcacttgaacccgggaggcggaggttgcaatgagccaagattgcgccgttgcactccaacctgggcgacaagagcgaaactccatctcaaaaaaacaaacaaacaaaaaagagagcaattgtccaatctgaagaacagagaaaaatagattaaaaagaaaatgaacagagagcctcaggaacatgtggggcaatattagatggtctaatgttcacataattggagttctagaaggagaggtgtatttgtttcctgtaaatgctgcaccaagtgatcacaaacttagtagctgaaaagaacagaaatttattctttctcagttctataggccagaagtctaaaatcaaagtgttggcagggctgcattgcctctggaggctgtaggggagagtccattccttgccttcttccagcttctggcagctgtcagcattccttggcttgtggccatatatctctctgctccatcttcacatggctttcttttctgtgtctctattgcctcttttgcctctctcttataaggacacttgggatggtattcaggacccacctgaaaaatccaaggtaaccgactcctctcaaaatccttaattacatcagcaaagaccctttttccaaataaaataatatttatgagtttcaggaattaaaacttgacatctttgggtgggtattattcagatactatgacagagagagatacctgcagaaaaaaatacattacaaggtatgtattgtacatacattgatttgagtgactgtggatttcttattagaaaccttgaggagtagaaacagtggaatatctttttttttttttaaattgagacggagtctcgttctgtcgcccaggctgaagtgcagtagcacgatatcagctcattgcatcctgggttcaagcaattctcccacctctgcctccagagtagctgggattacaggcgcatgctaccatgctcacctaattttcttatttttagtagagatggggtttcaccatgttggccaggcttgtctagaactcttgacctcaagtggtccacccacctcggcctcccaaaattctggggttacaggtgtgagccaccgtgcccggtgtggaatatctttaaattgctaaaacaaactgtctacccggaattagatatcaatgaaaatatccttcattaatgaagggaaaactaaagatattctcaaatgaagaaaaactaagataattcattggcagcagacctatactaatagaaaatatcaaaggtgccaggcacagtagctcatgtctgtaatcccagcactttggcactttgagaggccgaggtgggaggatcatatataaaattatatgcttggttgagtgtggtgactcatgcctgtaatcccagcactttgggagatcaaggtgggaggatcacttgagcacaggagttcaagaccagcctgggcaacatagtgacatcccatctgtacaaaaaattttagaactcagctgggtgtggcagcatgcacatgtagtcccggaaacttgggaggctgaggagggaggatcacttgagcttgggagttcaaggctgcagtgattcccagactgcaccactgcactccagcctgggtgatagagcaagactctgtctcaaaataaattaatcaaattaaatgatatgcttatattagaaagtaaataaaactaaaataaatgaaaccaaattgtattgaaaataccaataaaatagataaacttttagtgatactgaccaagaaaaaaacaaagatgacatagattaccaataccagcaatgaaagtgctaatgtcaatacagaacctacagatgttaaacggctaataagagaatattatgaataactttatgccaattccttcaagctcacttaagaagaaatatataacctgaataattctacagtgattaaagaaactgaaatttgtagtttacaacctttccataaaaaaaaaaaaaaaaaattctaggccagatggcctcactggcaaattctaccaaacatttaagtaagaaatgatatcaattcaacacaatctcttctacaaacaggaaacattttccagttcaggccagcattatcctgacatcaacaacagttaaagacattgtaagaaaaccagtatctcccataaacagagatgcaaaaatctcccacaaaatattagtaaaatgaacgcaatatataaaaagggtaatacactacaactccgtggagtttatccttgaactgcaaggctggcttaacatttaaaaatcaattgataggctgggcatagtggctcacgcctgtaatcccagcactttgggaggccaaggcgggtacattaccagaggtcagaagttcgagaccagcctggccaacatggtgaaaccctgtctctactaaaaatacaaaaattagccaggcatggtggcacacacctgtaatcccagctactcgggaggctgaggcaggagaattgcttgagcctgggagatggaggttgtggtgagctgagatcatgccactgcactccagcctggaggatagagcaagactctgtctcaaacaaacaaacaaacaaaaaaatcaattgataaatttctaaaaatataaaaattagccgggcatggtggtgcatgcctgtaatcccagctactcgggaggctgaggcatgagaattgcttgaacctaggaggcagaggttgcagtgagctaagatcgtaccactgcactccagcctgggcaacagagggagactctacatccaaaaaaaaaaaaaagacaaaagaaaatttcaccatatcaacaggctaaataagaaaaattgtatgattttttaataaaggcagaaaaagatttgtcaaaattcagtatccactcatgataaaaattcttagcagactaggagtagaagggaattaatttacttgacctgatagatgacacctacaaaaaaaactagaggccaagcacggtggctcacacttgtaattccagcactttgggaagccaaggcagcagatcacctgaactcaggagttcgagaccagcctggccaacatggtgaaaccccatctctactaaaaatacaaaattagccaggtgtggttgccgacacctgtaatcccagctactgggggggctgaggctggagaattgcttgaaactgggaggtggaaattgcagtgagccgagatcacaccaatgcacttctagcctgggcgacagagcaagactccagctcaaaaaaaagaaacaaacaggccaggcgtggtggctcacacctgtaatcccagcactttgggaggccaaggcaggtggatcacctgaggtcaggagttcgagaccagcctggccaacatggagaaaccccatctctattaaaaacacaaaaaaattagccgggcgtggtggcaggcgcctgtaatcccagctactcaggaggctgaggcaggagaatcgctagaaccctgggggcaaaggttgcagtgagctgagatgacacaactgcactccagcctgggcaacagagtgagactctgtctcaaaaaaaaaaaaaaaaaaaaaggaaaaaggaaacaaacaaatgagcaaaacttacaactgacatacttaatggtaaaaggctgaatgtattccccttaaaatcaggagcacggcacagatgtctactgtcaccattcctatttaatttattcataacatcacattggcagttacagttaatacaataaagcaagaaataaaaggcataggcatcagaaaggaagaagctgtttctatttgtagacaacactgtctacaaagaatctacaaaaaaaggctctgaaaatgcataaatgaggaatgggcaatgttattcaaagccacagcttttacttcaaattttctgtctccagatccttatatcaaatcgccaactggatatcttcacctgtgtgtttcccaggaactcctaagactcagtgtttccaagccaaatttactgatatctctccaaacttggtctttcaaaaaaattccctattcatctggtaatgccaccagtttacttattctaacatagcttcctaatattgatttatccatccatccatgctaaaaaatgaagatttgtcctagactatttctcttatctgccccatatgcttggtcagttaggctatcagttaatcttgttatgaaaccaactgccccacacctagaggcttaaaagaaaataatctataggccgggtgcgctggctcatgcctgtaatcccagcactttgggaggccaaggcgggcagatcacaagggcaggagttcgagaccagcctggccaacatggtgaaaccccgtctctactaaaatacaaaaattagccgggcatggtggcaggtgcctatagtcccagctacttgggagactgaggcaggagaatagcttgaacccaggaggcagaggttgcagtgagctgagatcatgccactgcgctccagcctgggtgacagagcgagactccatctcaaacaaaaagaaagaaaagaatctgtatttcctataattctatgtgtagactggctcactctaggatggcttcacacatatgtttggggcttcaacagagaatgctgagacaactgggaaggctggtagagctagggacactctcaaagtggtctcatcttctaggaggccagccttaatttaatcaaattgtggcaaagggttgccaacagtaagagtgtgaatcccaatggagaagaatttttcaagtctctattaacattacaattgctattgtcccaaggatcaaagcaaatcacttaaatcagtctgcgaggagactacccaagcatatggacattggtaggtgtgaaaaatttgtgtgggtagtagagggggtgacgagcttaactgcaacaatctaggacacttaaccctactgattctatttcataacctctccaatctcattcttcttcttgaatcccacttcactgacaagttcaagacctcatcttgttcctgaactacttataatagtctcctaatggagcttgcactgctactatcagcatatgaattttctgaaaaacacaaatccagtcacacaattctgttgcttaaaactcaatagcttccttttggccattagaataaactaagtgaggcccacaaactcattttctagctcatacttacctgacttatctcttactactctatccactctactcttccaaatacgaaaaacactctttaaaagaccatggtatttcaataccaccattttccatataatgtttctatctgcattgccctgttactgcttctgtcctggtaaatatcaacttattcttaagatttcatccaggaggctgaggcactagaatcacttgaacccaggaggcagaggttgcagtgagccaagattgcgccactgtactccaccctgggcaacagagcaaaactctatcaaaagaagaaagaaaaaaaaagatttcatcttaaatatcacaaatttaataaaagatttcttccctgacaaagttaaatgcttctaccttttgcttccattgcatctcacagaaccttcaattatagtgttttctccaaaatactgtaattatttgtttgcaggtctaaacatttccatcaccatgagatggcaacttttctttttcttttttttctgagatggagtcttgctctgttgcccaggatggagtgcagtggcatgatattggctcactgcaacctctgcctcaggttgaagcaattctcctgcctcagcctcctgagtaactgcattacaggcgcgtgccaccatacctcgataatttttgtatttttagtagagacggggttccaccatgttggccagcctggtcttgaactcctgacctcaggtgatccgcctgcctcaccctcccaaagtgctgggattacaggcgtgagccattgtgcttggccctaatttttatatttttagcagaaatggagtttcaccatgttggccaggttggtcttgaactgctgacctcaagtgatctacctgctgtggcctcccaaagtgctgagattacaggtgtgagccatcatgcctggcccgagactctttattatgtctctctctccaacatctagtattattcttaacactcagtaagtacttggaaaatgctttttgaattaaccaattaaaattaaaatgtctatttccaacagtccagatgccagtggaaagaaaatttatcagataatagcctgtcaccaagtcaaatcttctcatcaattcagtcctttctttcttcaaatatgtcacttttcagtcaagttacttgggtgaaatgcagctccaagtgcactaataaactttaaatatggactaatatacctgcagtgttatgagtatgtcaaaaggagaattttttttttttttttttgagacagggtctcactctgttcccagactggagcaataacggctcattgcagccttaatctccctggctcaagggattctcccacctcagcctcctgagtagctgggactacaggcccttgccacagtgcccagctaattttaacatttttttctagagacagggtctctctatgttgtccagtctgctctcgatctcttgggctcaagcgaccttttcacctcagcctcccaaagtgctaggattataggaatgaaccgtagtatctggccaagatgagaatttaaacactacatttggtattctaaatttacaaatgtaccaaatgtactaaaattatcagtgtactaatacatattggtgctgcattgtggctgtggctgaattatgttatattctgttttttttcctgtttcctaaatgttcacacattttgaagtttaaaaatatccacgacatagttgaaatgttagaatacttacacatatctcctcggaaaattcactatagtctggagcctggctctcacccttactgaaccagaaatctgtcagaaagatttaaattagtaagcacagagagacttaagtatgccttctaccaccgccgaccacccctacccccacccccaacaaaaaaagaaagccaatgtgtttttttttgaggtgggggtctccttctgccgcccaggctggagtgcagtggcacgatttcagctcactgcaacctccgccacctgggttcaagggattctcctgcctcagcctcccgagtagctgggattacaggcgcccgccaccaagcccgggtgatttttgtatttttagtagagacagggtttcgccatgttggccaggctggtctcaaactcctgacctcaagtgatcctcccgcctcggccttccaaagcgctgggattacaggggtgagccaccacgccaggcctaaacctttttttttttagacggagtgtcgctctgttgccaggctggagtgcagtggctaatcccggctcactgcaacctccgcctcccgggttcaagcgattctcctgcctcagcttcccgagtagctgagattacaggcacgcaccaccacacccggctaatttttgtatttttagtagagacggggtttcaccatattggccaggatgtggccacgatctcttgaccttgtgatccacccgccttggcctcccaaagtgctgggattacaggtgtgagctaccactcccctcctcagcttcgttttcttaatgaccttttaattttagaacagttttagattaacagaatttattttatttatttattttttgagaccgagtctcactcactctgttgcccaggctggagtgcagtggcacgatcttggctcactacaaactccacctcccgggttcaagtgattctcgtatgcctcagcttcccgagtatctgtagcggggattacaagtgtgagccaacgcccccggctaatttttgtagttttaatagagacgggtttcaccatgttggccaggctggtctctacctcctgagctcaagtgacccgcccgcctcggcctcccaaaatactgggattacaggtgtgagccactgcgcccgacctaaacttcgttttcttaataaccttttaattttagaacagttttagattaacataattattttgagggcagtagggtcctctataccccacgcaagacaggtttttcaactctaacttctacttccaccccacgcagactctccgcacctctctcctctcatctcgggttctgacaaggcctgatcctcacagcccaaattcacgattgtgaggaaaggtcagctcagaccaaacgtcaccgcccagacagacacaactaggtcaggcgtcaagctcgcggacatccgagcccggaaaccctaacactcctccaggggtaggttctccaagcctgaacatttttaacctcaaaacgcccaggatctcggaggcgtgtggtggatgccacataaatacataacacataacaacgacttattatttagcgccaggcctgaaggccgttctcaggcgcagctcgcttgttctcgctgccaaaacaccccggcagccgtgagctctccactcggcgcggtgcgggggcggggctaggaggtggagccggggcagggcgcgcgcgcgcgcgtgagaacgtccggggagcgcgcgcgccgccgccgttgccgccgggctgagagaagagcttgcggggtttgcggttgatggccccgactgaagggctggaggcggtgtatgccgctgttcttgctgtcgctcccgacacctccgtccgcttctggtcatgagaggttaggcctgggggaagcgggcagaggaggaggcggcgaggggccgcggcgcagggggctctggggagaataggcactcgaggctcggacgtgggtggagaactctgccctcggagattccggaagagttgtgttgaattttcttcccttttttctcctctttcttgtctgtgcatgaaggaaagtgggagggttctatgttatttatagaaaagacactgaaagcctgctgtccaacgtcgctcttcagttttgacgaaataacacccgtggcgtcggggcctcggtgaaagcctttagtgaaaagcactgaaacccaaaccgccagacacggtgactgcaccactgttcagtcctgggagtgaaatagaatgacacagaacattccctgacgttaactctagcctcctcctagacaaacgggaaaagcacggcagtgtgggatagcctctgcgttttgtcagctgggattccgactctgttcttctgtttctaggaggtccacactggatcatttattagagagatctttctctgctagagtcctctttcctcacacccctccctccgtaatacacacaccaccgacggtggcattttattgggcggactgtgtaactgcttattcagactaaagagttacctagcaattacgtggtgactctccaaagtatctatgctttaaatgtatttaggtaacattcttttgcgcggggaggtaatattcttggtggcaccattaattattggaaactttatgagctttgggaaagctgcttgagcagaaaatctaatttgtaggtcacctaagtgcagtgtttattattagttacctatgatgataataaggcattaagatttaatgttgttttttttcctaacatttccaaccattaaaaaatactggctcactcttccttatgaaacttctttgatgtagaatctacatcagagatgaaactgcaccatttgggaaaagtaaatgtaccagagtacccagtgaggactggtgctcattaacatctgctgggtacccatacttcatgactgttttgcggatgccttctgccattagagaactggaagcatttgcagctcaactttt

SEQ ID NO: 1435 - DNA, 2062 bp, Homo sapiens
gttacacacaggcagtggtatctgtgagcagctctgtggactcaaaggttttctccctgagaggcatgacccaggccagctgattcatcagagtcaggatggacgtggtagaggtcgcgggcagttggtgggcacaagagcgagaggacatcattatgaaatacgaaaagggacaccgagctgggctgccagaggacaaggggcctaagccttttcgaagctacaacaacaacgtcgatcatttggggattgtacatgagacggagctgcctcctctgactgcgcgggaggcgaagcaaattcggcgggagatcagccgaaagagcaagtgggtgaaaatgctgggagaatgggacacctacaaaaacagcagaaagctcatagatcgagcgtaccagggaattcccatgaacatccggggcccgatgtggtcagtcctcctgaacattgaggaaatcaagttgaaaaaccccggaagataccagatcatgaaggagaagggcaagaggtcatctgaacacatccagcagatggacctggacgtaagcgggacattaaggaggcatatattcttcagggatcgatacggaaccaagcagcgggaactactttacatcctcctggcgtatgaggagtataacccggaggtgggctactgcagggacctgagccacatcgccgccttgttcctcctctatcttcctgaggaggatgcattctgggcactggtgcagctgctggccagtgagaggcactccctgcagggatttcacagcccaaatggcgggaccgtccaggggctccaagaccaacaggagcatgtggtagccacgtcactacccaacaccatgtggcatcaggacaagaaagatctatgtgggcagtgttcgtccttaggctgcctcatccggatattgattgacgggatctctctcgggctcaccctgcgcctgtgggacgtgtatctggtagaaggcgaacaggcgttgatgccgataacaagaatcgcctttaaggttcagcagaagcgcctcacgaagacgtccaggtgtggcccgtgggcacgtttttggaaccggttcgttgatgcctgggccagggatgatgacactgtgctcaagcatcttagggcctctatgaagaaactaacaagaaagcagggggacctgccacccccagccaaacccgagcaagggtcgtcggcatccaggcctgtgccagcttcacgtggcgggaagaccctctgcaagggggacaggcaggcccctccaggcccaccagcccggttcccatggcccatttggtcagcttccccgccacgggcacctcgttcttccacaccctgtcctggtggggctgtccgggaagacacctaccctgtgggcactcagggtgtgcccagcccggccctggctcagggaggacctcagggttcctggagattcctgcagtggaactccatgccccgcctcccaacggacctggacgtaggggacccttggttccgccgttatgatttcagacagagctgctgggtccgtgccatatcccaggaggaccagccggccacctgctggcaggctgaacaccctgcggagcgggtgagatcggctttcactgcactgacactgattccgaccagggcacccccttcagagctagggacgaacagcagtgtgctcccacctcaggaccttgcctctgcggcctccacttggaaagttctcagttccctccaggcttctagaagcatctgggccagggctcatggctggataatttccctaggcttaacaacccaagcaagcttcgcctcctcgttttattttttgttaaacttatgagaatgtgttaagaaagagtgcagctcgagagacattcagagatggaacacaccagaccccagatcacaaagccaaccatgcccagcccctcccaacacccccagccccacgaccatcgttctgaattctgacgacgccgtgagcctgcctttgtactttaaactcatggaaggataaccaccttcacgttttgaaataaatgtttcctgttgaaatga

SEQ ID NO: 1436 - protein, 575 aa, Homo sapiens
MDVVEVAGSWWAQEREDIIMKYEKGHRAGLPEDKGPKPFRSYNNNVDHLGIVHETELPPLTAREAKQIRREISRKSKWVKMLGEWDTYKNSRKLIDRAYQGIPMNIRGPMWSVLLNIEEIKLKNPGRYQIMKEKGKRSSEHIQQMDLDVSGTLRRHIFFRDRYGTKQRELLYILLAYEEYNPEVGYCRDLSHIAALFLLYLPEEDAFWALVQLLASHSLQGFHSPNGGTVQGLQDQQEHVVATSLPNTMWHQDKKDLCGQCSSLGCLIRILIDGISLGLTLRLWDVYLVEGEQALMPITRIAFKVQQKRLTKTSRCGPWARFWNRFVDAWARDDDTVLKHLRASMKKLTRKQGDLPPPAKPEQGSSASRPVPASRGGKTLCKGDRQAPPGPPARFPWPIWSDPRAPRSSTPCPGGAVREDTYPVGTQGVPSPAQGGPQGSWRFLQWNSMPRLPTDLDVGDPWFRRYDFRQSCWVRAISQEDQPATCWQAEHPAERVRSAFTALTLIPTRAPPSELGTNSSVLPPQDLASAASTWKVLSSLQASRSIWARAHGWIISLGLTTQASFASSFYFLLNL

SEQ ID NO: 1437 - DNA, 1700 bp, Homo sapiens
cacgcaggagggggatgtgggcgagaccctccaacaagccccctcccactttctgcggtgtctccctctccccctcgcagggccctccaagttactagccgagcccagacccatttgtgggagaccccgcccctccctgcaagcacccacagcctcagagagcagcagaggcccctcactcctgcacgctcctccaagcttgccaggacaacgagcctggagccagggagacaagggaatcggtgtccctgacccacggagctttcagggagagggcgcaggcgggaccccgggcccagggccagagccaagagttcagccagaagtgggaacggtcagtcctggcatggactgggcagcccaggagggcagagggtgacccacgtccgggcccaatcacccactgcggagaggggtccccacctgaggtggcaaggggctgggtgacatccaaggcccctcccacctgagttctgactgggggccgtatcccaggcccaacagccctgggacgaaggtgtgtggcaggaagccgccagccagtctgaaccctgggggcagtcccaggagccacccgccatgccacgacagcttccccacgccaggcagcacgcacccctccctctgggatcagcagactacaggcgtgtcctcagtgtcaggccacgggggccacacagagaccccgaggactccagagacgcaggcaggtggggcccagcccggaaaggcctgcgtgggctcactggagatgctgaccgcgtctgttttcctttcagccaaacccgagcaagggtcgtcggcatccaggcctgtgccagcttcacgtggcgggaagaccctctgcaagggggacaggcaggcccctccaggcccaccagcccggttcccatggcccatttggtcagcttccccgccacgggcacctcgttcttccacaccctgtcctggtggggctgtccgggaagacacctaccctgtgggcactcagggtgtgcccagcccggccctggctcagggaggacctcagggttcctggagattcctgcagtggaactccatgccccgcctcccaacggacctggacgtaggggacccttggttccgccgttatgatttcagacagagctgctgggtccgtgccatatcccaggaggaccagccggccacctgctggcaggctgaacaccctgcggagcgggtgagatcggctttcactgcactgagccacaacgtgggcatggacttcccggccctgcagtgcgcccagcactgattccgaccagggcacccccttcagagctagggacgaacagcagtgtgctcccacctcaggaccttgcctctgcggcctccacttggaaagttctcagttccctccaggcttctagaagcatctgggccagggctcatggctggataatttccctaggcttaacaacccaagcaagcttcgcctcctcgttttattttttgttaaacttatgagaatgtgttaagaaagagtgcagctcgagagacattcagagatggaacacaccagaccccagatcacaaagccaaccatgcccagcccctcccaacacccccagccccacgaccatcgttctgaattctgacgacgccgtgagcctgcctttgtactttaaactcatggaaggataaccaccttcacgttttgaaataaatgtttcctgttg

SEQ ID NO: 1438 - protein, 170 aa, Homo sapiens
MLTASVFLSAKPEQGSSASRPVPASRGGKTLCKGDRQAPPGPPARFPWPIWSDPRAPRSSTPCPGGAVREDTYPVGTQGVPSPAQGGPQGSWRFLQWNSMPRLPTDLDVGDPWFRRYDFRQSCWVRAISQEDQPATCWQAEHPAERVRSAFTALSHNVGMDFPALQCAQH

SEQ ID NO: 1439 - DNA, 1889 bp, Homo sapiens
gttacacacaggcagtggtatctgtgagcagctctgtggactcaaaggttttctccctgagaggcatgacccaggccagctgattcatcagagtcaggatggacgtggtagaggtcgcgggcagttggtgggcacaagagcgagaggacatcattatgaaatacgaaaagatcatgaaggagaagggcaagaggtcatctgaacacatccagcagatggacctggacgtaagcgggacattaaggaggcatatattcttcagggatcgatacggaaccaagagacagcaatcaaatatatgactgatggatgtttactgaaacatattctgggagacccaagtcttaccaaattcagagtcattattttggatgaagcccatgaaagaactctaactacagatatcttatttggtctattgaagaagctatttcaggagaagtctcctaataggaaggagcatttaaaagtggtggtaatgtcagcaactatggaattagccaagctctctgcattctttggaaattgtccaatatttgatatacctggaaggctttatccagtcagagagaaattctgcaatttgattggtccacgagacagagaaaatactgcgtatattcaagcgattgtgaaagtcaccatggatatccatttgaatgaaatggctggagacatcttggtttttctgactggccagtttgaaatagaaaaaagttgtgagttactttttcagatggcagagtctgttgattatgattatgatgttcaagataccatcctcgatggcttgttaatattgccgtgttatggatcaatgacaactgatcaacagaggaggatatttttgccaccaccacctggaattagaaaatgtgtcatatccaccaatatttctgcaacgtctttgacaatagatggaatcagatatgtggtagatggtggcttcgtgaagcagttaaatcacaaccccagattagggttggacatcctggaggtggttccaatttcaaagagcgaggcattacagcgaagtggccgagctggcaggacttcttcaggaaaatgctttcggatctatagtaaagatttttggaaccagtgtatgcctgaccatgtgatccctgaaattaagagaactagtttgacatctgtagttctgaccttaaagtgccttgccatacacgatgtcataaggtttccctatttggatccacctaatgagagacttattttagaagctcttaaacagctttaccagtgtgatgctattgacaggagtggccatgtcaccagattgggtttgtctatggtggagtttcctttgcctccacatctgacatgtgcagtaataaaagctgcttccctggattgtgaagatttactacttccaatagcagcaatgttgtctgtggaaaacgtcttcattagacctgttgatccagagtaccagaaggaagcagaacagagacatcgagaattggcagctaaagctggaggatttaatgactttgcaactttagctgtcatctttgaacaatgcaaatcaagtggagctccagcttcatggtgccaaaaacactggattcattggaggtgcttattttctgcatttcgtgtggaagctcaacttcgagaactaatcaggaagcttaaacagtggcttccggaagttcctggtccacaacgtcaaggagctggaagtgctgctgatgtgcaacaaatcttactgtgccgagatcactcaccatgtttcctccaagaaccgcaaagccatcgtggaaagagctgcccaactggccatcaaagtcaccaaccccaatgccaggctgcgcagcaaagaaaatgagtagacagctcgtgtgcatgttttctgtttaaataaaagt

SEQ ID NO: 1440 - protein, 512 aa, Homo sapiens
MTDGCLLKHILGDPSLTKFRVIILDEAHERTLTTDILFGLLKKLFQEKSPNRKEHLKVVVMSATMELAKLSAFFGNCPIFDIPGRLYPVREKFCNLIGPRDRENTAYIQAIVKVTMDIHLNEMAGDILVFLTGQFEIEKSCELLFQMAESVDYDYDVQDTILDGLLILPCYGSMTTDQQRRIFLPPPPGIRKCVISTNISATSLTIDGIRYVVDGGFVKQLNHNPRLGLDIVVPISKSEALQRSGRAGRTSSGKCFRIYSKDFWNQCMPDHVIPEIKRTSLTSVVLTLKCLAIHDVIRFPYLDPPNERLIALKQLYQCDAIDRSGHVTRLGLSMVEFPLPPHLTCAVIKAASLDCEDLLLPIAAMLSVENVFIRPVDPEYQKEAEQRHRELAAKAGGFNDFATLAVIFEQCKSSGAPASWCQKHWIHWRCLFSAFRVEAQLRELIRKLKQWLPEVPGPQRQGAGSAADVQQILLCRDHSPCFLQEPQSHRGKSCPTGHQSHQPQCQAAQQRK

SEQ ID NO: 1441 - DNA, 1357 bp, Homo sapiens
gttacacacaggcagtggtatctgtgagcagctctgtggactcaaaggttttctccctgagaggcatgacccaggccagctgattcatcagagtcaggatggacgtggtagaggtcgcgggcagttggtgggcacaagagcgagaggacatcattatgaaatacgaaaagatcatgaaggagaagggcaagaggtcatctgaacacatccagcagatggacctggacgtaagcgggacattaaggaggcatatattcttcagggatcgatacggaaccaagagacagcaatcaaatatatgactgatggatgtttactgaaacatattctgggagacccaagtcttaccaaattcagagtcattattttggatgaagcccatgaaagaactctaactacagatatcttatttggtctattgaagaagctatttcaggagaagtctcctaataggaaggagcatttaaaagtggtggtaatgtcagcaactatggaattagccaagctctctgcattctttggaaattgtccaatatttgatatacctggaaggctttatccagtcagagagaaattctgcaatttgattggtccacgagacagagaaaatactgcgtatattcaagcgattgtgaaagtcaccatggatatccatttgaatgaaatggctggagacatcttggtttttctgactggccagtttgaaatagaaaaaagttgtgagttactttttcagatggcagagtctgttgattatgattatgatgttcaagataccatcctcgatggcttgttaatattgccgtgttatggatcaatgacaactgatcaacagaggaggatatttttgccaccaccacctggaattagaaaatgtgtcatatccaccaatatttctgcaacgtctttgacaatagatggaatcagatatgtggtagatggtggcttcgtgaagcagttaaatcacaaccccagattagggttggacatcctggaggtggttccaatttcaaaaacattttggggaatttttgggtttttttccttttgtaggagcgaggcattacagcgaagtggccgagctggcaggacttcttcaggaaaatgctttcggatctatagtaaagatttttggaaccagtgtatgcctgaccatgtgatccctgaaattaagagaactagtttgacatctgtagttctgaccttaaagtgccttgccatacacgatgtcataaggaagaataattttaaagctgaaaatgcaagaacaggtctgaataagaaggaattgatgactaaggtggaaggaaataatgagggaaaacctaccaccataagtgattttgtcttgagcatt

SEQ ID NO: 1442 - protein, 349 aa, Homo sapiens
MTDGCLLKHILGDPSLTKFRVIILDEAHERTLTTDILFGLLKKLFQEKSPNRKEHLKVVVMSATMELAKLSAFFGNCPIFDIPGRLYPVREKFCNLIGPRDRENTAYIQAIVKVTMDIHLNEMAGDILVFLTGQFEIEKSCELLFQMAESVDYDYDVQDTILDGLLILPCYGSMTTDQQRRIFLPPPPGIRKCVISTNISATSLTIDGIRYVVDGGFVKQLNHNPRLGLDIVVPISKTFWGIFGFFSFCRSEALQRSGRAGRTSSGKCFRIYSKDFWNQCMPDHVIPEIKRTSLTSVVLTLKCLAIHDVIRKNNFKAENARTQKKELMTKVEGNNEGKPTTISDFVLSI

SEQ ID NO: 1443 - DNA, 38272 bp, Mus musculus
cgccatcaccccggctgatgcatgctgaggagacgacggggctgtcatgagcctgtgggctaacggctgctcagtggagagtctctcagatggaactgatggaaatgtcccaacttccagaacgtctattaccttagcctgctgaacacagctgtgggtgctgcgctgtgcggacgcccacactgccgtgtcaggaagcatgtacttttaaacctctaatttctctaataatgtctttggtgatttgtgtaggtttggcattgtaatcagagtgcttcctggcttggtttattcagtttgcagccttaaaatgtttaaaatgtacactgtcctgatacacacaatgcgaacaagtgatggagtcaagaggtccacccttggtgtctcaaaatgaagcaaatttactgtttgtgtggtgtgttaatctatttataccaggagcatccagcgctcacggagccagccagtctcctttactgggccccactgcctgttccactgacctataccagcctagactaggtggacacacagtaataaacccttggaaacatttgtaagagggaggagggtgggctattgttgaaaatataaagctctcattggtgtggtgcctttaaaccattaagcgctgagaaggcagaagcagcaggatctcttgtgagttcaaggccagcctgctctacattgtgaatttcacaacagtgaaggttatgtagagacaccctgtctcaaaaccaaaacaataagagataacaagacaaaatatagagctccacagtacttagtcacagtgtgggtctatgtgaaggttacggcagaggtggctaaacaaagcccaaagaactctttcttaactaatggatgcactgccaagactggtgataggaagagacaggctctccctatatagtcttggctagcctggaactcactaagtagaccaggctagcctgaaactcagagagatccacttgcctctgctgccaaatgctgggatcaaagatatgtatgtaccaggcacacccaacttttaagaagattcctaaaggggggctggagagatggctcagcggttaaaagcactgactgctcttccacaggtcctgagttcaattcccagcaaccacatggtggctcacaaccatctataatgggatctgatgttctcttctggtgtgtctgaagatagctacagtgtattcatatacataaaataaataattctttacaaaaaagaatatttctaatatataaaacagaatatccttatagaaataatattctgggtttggatcttgtcactcagtcttaaatgtgtgtgtagactccagggacccaactgtctgcctcccataactttgagtacagttatgtgccagtgcgcccagtgcgttgttacttcttaagctgcctctgaccctctttgagacaaaagccaacacttcctcgggacagagtgacagaggtggcattttagccccggagggtttgtagctttcccattttcttacttttccagtggagaaggcggcagggcagcctggggtttggggtatcctgaggccccctctagagcgggccttcctagctcctgctctctgtccagcagctttccaggaacaggctggtggagcttcctcagctctccatggacagctgcatgggtgtggcctccagagtcctcactgagcctgagttcagttgtccatccttgttcatcctcactctcaaatccagcaccagccttgtgcatgctacacaaatgctatacgcccacctccatctctgcttttgtttttgttgttttttttaaaattttcttagcaacatagagaaatcaatttttacattttaaagtgatttctgggtgtatgaaatatctaccatatcctcatatctagaggtctcaagacatgaacatgctcagaactaaacgtttgctctaccaagctccttccctccatcccgagtagaggagctaactgagggccttgtatacaatatgcatgtgttctactgtcaagctcacctcagccttgactctaatgttagctggatagttcccatgacaatctagtatgtctgcctcagatactgcaaagtaaatatgtataaaattgaaaagggcttaaccactgaaggtcattaggatgtggttgaattttataattttttttctaaaccacattgtttgtgattgcactgcctttaatcccagcactcggcaggcagaggcaggtagaactatatgagttctaggccagcctgatccacatagtgagatccaggtcagcacaagttatataataagaccctgttttgctgggcagtggtgatgcacacctttaatcccagcacttgggaggcagaggcaggcggatttctgagttcgaggccagcctggtctacagagtgagttccaggacagccagggctacacagagaaaccctgtctcgaaaaaaacaaaaaaacaaaaacaaaacaaacaaagaaaaaccaaccaacccccccccccaaaagaccctgtctttaaaaaaagaggggtggggggggtgctggaaagatggctcagcagttaagagcattggctgctcttccaaaggtcctgagttaaaatcccagcaaccacatggtggctcacaaccatccataatgagatctgatgccctcttctggtgtctgaagacagctacaatgtacttaagtataataaataaatagatagatagatagatagatagatagatagatagatagatagatagatagatagaaagaaaaggggggtgcggagggagggaggaaggaaggaaggaaggaagtccccagacatgtctagggactggtgggtttctttctttttttgaggtggtgtggacccagcccttatgtggtctgagcatgtagtctaccagtgagtaacactcttggtcctacttttggaaggaaaactaaagcagcaacatttactgctccaaataaatccttggaagcggaagtcactgccactaggtaacgtgggcacaccaggacggtcatggcgtttgtgagccacagctttcgggaggctgcatgtatttgaaaaatatttactttaaagcaaacactgtgtttgttttatttacagagctcagattccgatgtcaacagagctaagcctctggcataatgtataaaactgaaaaactaaaaatatataaaagttcaagtatatattcatatattcattaacataagtatctttagtaaagtaggatttttacttcttgtgagtaaacataagtggatctctaatgatttcttagtgttgttcaagaaatgcctatgtgcacacaatatgtgacttagaaacaaaatagacaaagactatttctacctatgaatatataaaatctgtgctttgctgtttgagatcaaagttaactgctgtgtagaaaacatttccttttacacatgggctctaaactgcttggaagcaagaatggaaagtatttcaaaggctgtctcatagttatacttgattatatatatatatatatatatatatatatatatatatacacatacatatatagtaaagctgtaggttttgggttttttactttttgaggaccctaacaagattaatttgattttagaagatccaaacaacccaaaggccagcactgccaaagtcaagtcacaccaagtgacagcagggtttccagtgtagcagcatctgatcccatgtatctatttacttattaatgtgtgtaggtgtttgatcactatgagcatgcccgatgcctacagagggcagaagagtccatggaactggggttacagatagttgctagctgcctatgggtgctgggactcagacccaggtcctctgaagagcagccagtgctcttacgtgctgacccacctctccagcccagacaacagcgttctcggtctgggtctccccatgcctcagcagaggctatttttcactatcgctctgcttactacctttgccaaactgcaacaccatcttagcatcttaaggcaaagtatgaaggaaggcagtttgtattgtttgttagtcactcttggtaagtcccttaaatgacaagtttgtatctgaggcgtgtcaggcattctctgctgtgcctatgctttaaacagacgtgtgattctcagaaacaatttctttcaattccatcaaaaccataagaaatgattcatgcatgtgtctccatgtcctgatgtgcagagaacaccggcaggctgatgtttcagatcttactttactgagctaatcttccctccctacttcactgaaaatattttcattctgtctgacaaaaagtttaaaaagtacattaactgtaactaaaaatgtaccacaaatgacacattaatgagattaatggtgtgtgtcttgttctctcaagtcgtcatagtcttacctttgatgagcctagactgatagtttaattacacaaacggtatcattttcttgtgggactctagggagctagatcactgtgaaattctcggatccttttaaaatgcagctttaaaacaaaacaaaagaactgactagatcagagtgaaagcaagagagatgtgaagacaagccacatcagtaccagaaaccccaactcatcaagaaaaggccggtaacctcgacagcaggagacgaggcaatgctagttattcatcatcaggaccttggagagggcccattacttcctcttacatcagttaaggagcaagagctatgcaaagtgaccctcccccatacctggaatgtttagctcaactgtagtgcttgtctaccatgtatacagccgtaggccatgcctcagaactacaagccaagaaaaggagaacagaaaccaaccaggtgtggtggtgcaagcctgaaatcccagctgctcagacagctttcatttgaggcctgtttgggcaacgtagtgagacctcatctcaaaataaaaattaaggtcagcaaaatggcctggaccagtgaatctcaacctttctaacgctgcgagcctttaatccagtcccgcatgtcgtggtgactcccaaccataaaattattttgctgctacttcacaactgtgattttgctactgctatgaatcggaatgcaatacctgatgtgtgactcccaaagaggtcatgacccaaaaaagttgagaaccactggcctaggggttaaaggtgcttgcaaccaagcttaacaacctagattctgttctcggaatccacacggtgaaagagaatcaactcttgcagattgtccttggtcctcggcaagccatggcacctgaatgccccctctctgacacacacactgattagatggatggatgaatgaatgaatgaatgcatggatgagtaattgtaatttttttttttttagtgaaagggggctgaagggttgttcaggtgatagaccacttgcttaacatgtaagaggccctagggtcaatgcccaacgttgctaatacagacagacagacagacaggtcccaactcaagacctgcaattttaaaaagcaccgatgagagcttgagcagtgtctgcagggacgaggacttgagttcagtccccagggtccacatggaaaccaggtatgttggcatgtgcctgaaatctcagggccacaaagacaagagcaccccagggttcactagccagccagtctggccaaagcatagaccccaattccaaggaagaaactgcctcaaagcgggggacagccatctttagaatacacttgcgcagacatgtatatgtacaccccctatgcatctggacacacgtgaacacacacacaaacacaaagataaagaggtcctatgggatgagaaaggtaatatcagaagttattttcccctctagaggcctggagcataagcagtgtgatttcatgtttctaaaacaggtctttggtctcacctgacctttcgaatatgaactatactaggaaggcagggtttatgcttcctgttcatagaaatatactgaatcatgtatatgtatatgcatgtgtatgtatatatgtatatgtacatcttgagcggcttcagcaaagcccggcaggttagatggggttgtccttacttccctaatagcaagcagaagcacctatctgcacttatcctaagtgcttgcctctcctctctccccttcttttcctatcatacgtcatcctgtgcaagactggtatttccatgtacagattagattccacccctgaagtcccacttctgtttctttagatttacctgttacatgcttttcatataaatagagttctggaatctgcgatcttcaggacagtcttctgctaccatattttcttttttccttttttttttttttttttttttctcgagacagggcttctctgtgtagccctggctgtcttggaactcactctgtagaccaggctggcctcaaactcagaaatccgcctgcctctgactcctgagtgctgggattaaaggtgtgcgccaccacgcccggctccatattttcaaagatcatctacacaattacaggtaaaagcactttgttcctttaatggctaaaagatattctactcaggggttctggagatggctcagcagagtaagagcatctgagtttaattcccagcacctacatggtggctcacagccatctgtaactccagttccagggatcggtgccctcttctggcctctgcagaccctaggcacccatgtgacacacagatgcacatgcagagaaagcagctcagtactaaacgggagattacatctgcatctgctgcatcctctgtgcgtggtgcacatgcaggcctgggtgtgccgtgtgccttcactgctcaggcatataccgaggacgaggttggtgagccatatcatgtgtatacagtggaatttcagagcaccgccaaagtcgctgtaccgttctgtattcccacttagcaatatgtaggcccagtgtccgatgtcattctactgcttgctgtcatgtctttccttttttttattattagatattttcttcatttacatttcaaatgctatcctgaaagtcccctataccctcccccctcccctgctccccaacccatccactcctgcttcctggccctggcattcccctgtactggggcatataatcttcacaagaccaagggcctctcctcccaatgatggctgactaggccatcttctgctacatatgcagctagagacacgagctccggggggtactggttagttcatattgttcctcctatagggctgaagaccccttcatctccttgggtactttctctagttcctccattgggggccctgtgttccatccaatagctgactgtgagcatccacttctgtatttgccaggcactggcagagcctcacaagagacagctatatcagggtcctttcagcaaaatcttgctggcatatgcaatagtgtttgggtttggtggccatttatgggatggatccccaggtgggacagtctctggttggtccttccttctgtctcagctccaaactttgtctctgtaactccctccatgggtattttgttccccattctaaggaggaacgatgtctttccttttttaatgggagagaggaagaagcagggactcaactcagggcctgtgcacactagccaagcattctactccacagcagccctgggcaatgacgtttggattggtgtttttatatatggagattaccccctcccctatcatttttgagatattttccctctcactgaattatccaactgcccaccctcctaacaccaacactcatctccctcccccaatcaatttacttgctaatagattccctacccttttcttcagctcctttgctcagcagggatgctacaatcacccaggcctcctccttcaaacatttaactcccctgactcctcttagagtttctctagctcttcagtctctctctctctgtgtgtgtgtgtgtgtgtgtgtgttttgggggggggtgcgtttcagacagggtctcaccgtgtaatactggatggtctggaactcactttgtaggccagactggtccaactcacagactgcctgcctctctgcctctggagtgctgggattaaaggtgtgtgttaccatgcctggctctttctaatctctgtaggttcctgtcttctagcaagctttaaaatactggatttcagtaacagtgttgctgttgaacaaattatgacaaaacatagtggcataataaagtcatttattatactatagtttcttttggtcaggatttcagactggagcagcacgttcccatttctgttccatgggattgggagcctcaggctgaagactggtgttgtctgaagccctgtgcacttacacgtcagacagctgatggtggctgttagctggggccaggggcctcagctcatatccgtgggaccctgtgcatgccgtctctccaggttggctggtttggacttcctcacagtatggctgctgggttccaagaacaagcagtctagagaggggaagaaagcaaacagcgagggtagccagggagcctactttgcccttaaaaagcaagttctcaggtctaaccacatgtaaagaaaaaagcaacagactttatgtgaaatgacaaggttctaaaatagcacgggacctggggctggaactccatgggaaagcacttggctagcaggcctgaggctctaagttaaagaaaaacaaaacatgggacccgaaatcctactgtagcctgctacagagaaagcctgccacagccttctggtcacaggtcatagcatccatacatgccacattctttctccttctctcccgctttgtgcctcccaaagcctcaccccgtgatggcatcaggctcaggctagagagtcactgtatgtgccagtgcgatcccatgagcaaagctccttgtttacagttgcatctaacctgaaaaccgaggcaaactctctgcctcacattccatagtatctaaagcaatgtatatgctacagtatagagcatttgtctcctcgttctccccatgttcactgctattcctatagtttcaaagagcaccttgtgattctcagattctctgtctgaattctatctcagttttcaaatctgagcgtctctctgaaatgtcagttaataattttataccccccaaaataattttatactcttataaaatatctcatcatcatttctaccttaacatgctaaaatgaactcttgttttctgcattagcccatgtcctcaaatctcttgtcctgctcctgtcggcccatagctgttcagacaacccaggacttctcaatcctgtctggttcactcgcctcaacccaactgtcaccaagttctgcagcatctttctccaaagtatacctccctccccaaccccagtgctcacattcttcctcacgcccctcccctttgtgcctacctttctcacgctcttactcctgtcccacccctcccactacccccttctgtggattttcagtgtcctttactgcccatctttcattcttgctacattctaacttcctgtgcacagcaaaccaagggaatattttagcttctagctcaccgtggcacttccttgctcaaaaatttgtgactcaaaaacagttctcataaaggcctgtgcaaatgctagtctgaagtatttcatcctgccttcccacgtccctataatgctatctttttcacgtttaagggtatggcatgactgtccacccaaccgaggtaggtatcactgtaggggtcaccgtattgtttcctttacaaagtttatctgactttcaggttgcattctgttagtttacttgcttaaccacctgcctacccagtgggatggtaaatctggtcagggactagccctgaggtattcactaatatctatccagcacctagcagggggtccgtcaaataacacactggatggtaagggagaatctgggataacacagcatgacatgtattgtggcacattagagtatcgcttccgagttcttactgaggatagcttgtgcttctcttccagtaactgcccttcctttctggctgctgctttagccagagccacatcagatgaagtcctccagagtgacctttctgctcactgtatcccaaaggaaacggacggcacagaagggactgtgggtgagcacctttctccattatttgtttaaacatactaaaattttctcatggacagatagctacagaaaatatctatagcatattaaacccaactacatatactttctagtgtctagacagtagtaaggaatttttttcttaaaaattaataaaaagaggaaagaaaaaaatctaagcacacgcacacatatttgaaaataaactatttttataaaattaaatataatggtacatgggaagtactagaaacaggaaattgacattgctatctggtaaggagcaagtgtatacaatggagttgagctcagaagtgtgtacctgcagtctcagctacttaggaggccatggcaggaaggtcactggagcctaggcattctagacagggtcaggcatagaccttttcttaactaaaaatacccagtttgagcacaacaaaggaaaatgatgaggaaagtcgagtttaagaagaacctgtgtaaaacattttgtttatccatggcggcaccaccccaaatacaccccatctcttctaagatgtcatcctgaagaatacacataaaagcatacaacagtttttaaaacttagaacaagactcatccatcttgttaagttttatatccactaaaacacagcactgacagatatgtaacgtaatttatttattacacggatcattgtgtgtctttgttgataaggattaaggctcagcagtcattcccacactcagccctggtgtcaatggaactgagcccaaggccctggacatgatgctcctcacacactgctcagaatgttttgagacaggtcttgctgactgcccaggctggcctgaaacacgctcctcccacgcagcaacccaagaggctgagttacaggaatgtgctgccacactggcttccagcttacatattgggtttaaccatacttgaaaatgattaagcaaactatttgtataaaatcagggcctgagtaacccaccatacacttctatgtttggtgcagggagcggaacctggagtttcttacatgctaagtatgtgttctaccaacagagtaacatccctagcttactactccaaaattttgagggtgatatttcattgatatttattggctttgagacagggtcttaactctgtagcctcaggctggccttcaactcactgccttgctgtagtctcccgagcgctgagatcacagcatgcgctaccatgcttagcccttctgttctattctaagcacttgcctatcaacatggtacataaggaacagagcatgtgttataaatagaaagccatcccagagactgtgtggcattcctgctcttcccgtctctctctggactgtgacagaaaactgtcaaggagggagttactacttgttcttactgagaataacggattcacctagaaccacattgtcccagagccaagctgaatggagcctttctaacaaggcacggtctttcccctgatgctgatgctgaaagcaaagcccttgtaatgaaaagttctgctcaactgcagaggggtgacagctgactcagctgcagctcgacacagtgacattagcgactgacgagcagtttacagctgtgagtgggtgggctgctgcctggatggttctcactttctcacgccccttattttgttttatttttccatctcaagtggctattatttatatactactgttctatagcacccctgctggagactgtctcagggctgtgtgctgccccaaatgctggctctggagaattagctgaaccccacaagacaataaaagtaaaataaagttgatttaaaaaaaatagatgtcattgatcacaatgttggaaatttttcctaggatatcactcagaatcatctgcaggctgttgagatctcaaccatctgccaatctcttagccatttcacacaaatcagtaggtgtgagctgcacagctagggtctctacggggacactgttggcccacacagtacagagggacacatacaccgctaagggcttacagcacaggcagtgaggtcccactgaaaggacacataaaacctctctttagcaggaactggttaaacgcctttaatcgcagcactcaggaggcagaggctgccatgtggttgctgggaactgaacttgaatcctctacaagagcaacctgtgctcctaaccactgagccctttcactagtccttaacatttaaattttattagttcccttactggacagggtggtgtatataatgaccgcgatatacgaaccacagaaagatggaattgtttatatcattggctgggtatctgggaatgtgtcgtgtattccacccgttctccttggagtttctgcatgctttgtaggcctcttttgtgatttgtgtcaactgaggacacagtcatgtcaagtctgcacgggggtagggatacctcctgttgcagtctctatgagctctagtacttaagaggaataaacatctggagttgcttaaagcaataaaaatatttggctgtttatggacttgttcatgtatataactcctcagggagtatttgttctttgaacttcattctttttcaaatacacccttgcttttcagttatataaaactgagaaggggcggctgggtgtggtagtgcatgcccacagaccacagcactggtgagatgggagcagcctgtgctatgagactgtctcagaacaaacaaatgagcaaatacataaatatgttcaagacataaagaagactgctgtatattagtaataaagagaccagaaataaaatcttttgacactttctggatataaagatgttaagagttctgagttgatgtaggggctcacacctctaatccctgtactgagtcggctgagggagaaggaattccagaccaggccagcctgggaacagagtgagaccctgtctcagaaaaggggtggtgcagtttgtgttggatgtgataatttataacttggggaactctaactccagcacttgggaggctatagcaggatcctgcttgaatctgaggccagcctaggctctatagaggaattctgtctcaaagagatagagcatgtgcacggtgtttgtctggatgtacagggctggagttctagcctcagtactataaaacagaaggaaaattaatgtaagaattatgcataagaacagaaatggagtcacagattcaaggctaacccgagactggaagtaaagaaatgggagtccaggttccatgctgccgaggaacacacagtctctcttcctctgggtttctgttctaggctacaggaagcatctgtaaccattgcccgtctgccacatacttcctcgggctgtcaagctgtgtctgatttagtaaagcaacttttaggaggctttttttttaaaaactgagatattataggaggaacatctaaagtactgaaaccctaatctttggttacttgagtaactgcaaactgagcggaagactaggtggttagagatgttagatacggtctcttcaatgcactgatcatgtgccaagggatacaagtcggcttcagaagccagatgttaactgggtcaactgtagagtgaaggggacgtaaaccaggtgatgctggtgtgtgtctacagtcccagcactggggaagggttgtcgaaaacttaaggcagaggctgacttgaaaataaacaaacaaatgagcaaacaaacaaaaaaataaggctagtcatggtatcacacatgcctttaatcccagcactctggaggcagggagaggtggatctctgatttcaaggtcagcatggtctacagagtgagttccaggatagccaaagctacacagagaaactttgcttttaaaaaccaaacaataataataataataataaaatttaaaaatcaatagtacacatagaattcaggttgccttccccaaataaacatttaacctatcaattactctattgactaaactactgcctaaaagtttaattgataatatatcaaggaaaatatataactcagttccaaatgatagagctggaattcgttgcaagttgtcagttcgttatagcagacagaagacataaaagagatcaggaaggagagccaggagtcttcgtaagcctttcctgttctgagtggctggatatacatccactgctcacggttcagtctctcttctgagcctagaaggcttggctcgccatgtgataatcctagcagtcgtccacagtgaaggctgctctgggctagagggcaaagggctgtgaacaagcctggcctgatcagaggctttcttctgccacagagggtgatcttggtggcagctgatggctctctgctaggtagtgtcttttccttgagttaaggaggatgtgactggagtgaactacttctgtccaaccaggtaggggagtggggagcagcgttacatggctctttattggggtctctgcttccttcacagaaattgagacagtgaaattggcccgttctgtcttcagcaaactacatgagatctgctgcagttgggtgaaggacttccctctgcgcaggaggcctcagatttattatgagacgtcaattcatgccatcaagaacatgcgaaggaaaatggaggacaaacacgtctgcattcctgactttaacatgctcttcaacctagaggtaaagggctctctcttgttgagagctggtgtgacatagccctgccaggaaggaccggtgtcccacctgtagcccgtaggacggagggaggctggctgtactaaaaaacagaacttgtttgattgttttgagtaagttcaagtcattccaaattgggaacattatgttatttttaataggttcacatggttcaaaattgggagaataaaaatcttttgtggacagccagttcctatgcagtaaaggaagagaagttaccagttttccttgaagcttctaaagctattttattagcaaccaaagaaaatcattatatcgaaataacacatttttaaaaggagaatttttctgtagtaaaggcaagtggcttattaagttctcagtataccatgttgctgaagcaacaaaaaacaacataaaaggatacatttaaggctgagacaaatttgatttcatctgattttctttttaaaatctgggtctctgagatagaaagtagttggaattatactccacacatctctgtgactgacagacgggatccatacgagccttgtcagcttaataaccattttcttgctgtcttctctctctctattagatgtattatgctaatgcaaacaaaggagggtttgtttccctgcctgtcactcaccttttctttcctctgttaagtccatcacttcaaaatggcagtgtagtactttatacacagcacagtgtttccttcacttagcagcagctaactttaaacttcagctttaacttttttttaataaaaaaaattgtatttacgcattcagaatgtcaacaaaaagccgcatttttttttttttgcaattacagagtggtattcagttaacaaaacaacaattatcttcatataagctgcatcagagacatctgaagatgaaaaaaataaaacccaaaaataaaaccaaaaggaaaaaaaaaactactgtccccatatataactaatttgtgctgtgcaccaacaagaacctgctttaaatttccatgccaatttacaacccccagactgtaccaggcaaggttagtggctactgaaaataccaccaggacagggctatctaaagacacattcggtagtgtgttgactatacaaaactgtcaagggctaaagagcagtcagggatcaagagagacagcacctggtctttgtttccagcgctgtgcccatgcaaatgtacccaaaggctgcctctacagctacttcaagactcagattgaaggccttagttctggatgttaacctggatggttttcatttttctccaaatttgaaatgaagtccaaaggcctagctctgaagcgttagttgccttgacgcaccaaagcaggttttgaaggctacttagcagtgattatttagagctttgcaaattcttatacttttttatctggtaacttcatttaaaattcttcatcacaacagaaatacacctaagtcttaaatatgtgtttgacaaaagtgttttagcattattaatacaaaataaatcagaaatgacctaaaaattaagggaaatgtgtctctcgtcaagatgtgtctgaatagtacttagtgacatgcagaaatgctaatgacataaagtaggacggtaaaactttatgtatgctatgatcctgacttacactatatgggctgggaggcgtggtggcgcacggctttaatcccagcactcgggaggcagaggcaggcggatcctgagtttgaggccagcctgatctacaaaattagacagccagggctacacagggaaatcctgtcttgaaaaaaaaaaaaaacaaccaaccaactaaacccaacaaatcaaaaccaaaaaaaaaaaaaaaaaaatagagccaggtgtggtggtatacacctgtaatccaggattctggaggctgaggcaggagagctgctacacagcaaggccctgtgtcagaaaccaaagcacacacgtaggcatgcagatatagaatgcttgtctcacctatccaaagtcctactaaacacccccacccaaacaaaaccaagccacagatatacagacatgagggtgttatttctttatgtttattatttaaacaaattatacatcattatacattttccctataaaaactacactattttaaaagaaaattgtatagtgctgggagtgaagcctagagatgttgcacgagttagcggagaccccaccactaatgcagcaacgactttgcctgactgctggcgtttctgatattacactgagttgttgaaattgagtataactttagccagattctgtttagtcaatctttaatggcactataaattgttttgcttaaaatataagacatactagtgtcagtgtctggaaagtagatatcggtttcttaatttttgagtgttaccattattcactggacagttatatatggtgtttttgttaaagagacgttttccaaggcacagatatgcctgtgtcatctctctctctgacacaagtgtgaaggtagggcagcccctcagccttagcaaaactcagctcaactcgggttacatgacgctgtgtcaattttaaggaaagagaaagaaaaacccaaagcaagcaagcaaacaaaaacagccccctaagaaaagatttgtttacgagtgcatgacagaacccagagtcccaaggaaaaaaatggaaagactcacaaatgaagtccttagcctctgctgcctccagggagcgcaggagtcactcaaaccccagtgactcacacacatcagagacagatctaagcacctgagctgaaaatgaagcaagcaactcgagacacagcagaaggtaagagcgatgctggcagctggcctttgagaaacgggtgctaaagcctagactgaggctgaagctaagttgccaggcacaccacgacactgggcatctgacgtggctcaaggctggttaacaagcttagagactatttatggcagtaagaattcaatgtgaccaagaatgatgtgtgaaagaggcattatcatacagaactgtgtatgtttttaatctctggtattttagacctgaacacaattggctcagtgctggaatgttttattgttctgtggtattttgaaagaagtactccatgcagaacggcttttgctcacttcttcctcacaccgtctttcctcctcttcctcgcaactatgattttgaagcaaatgcatgtgggtggtttccatggtacaagataacaagtttcacagagagggcgctccagcctgcactaattgggcatgatatgttccagggctgtgtgtgtaaacacagatgccctagcactgcaggtatgcagcagctgatcaggcatgtgagtgaagggaaacattgagtctcatgatctgaatgacaaacacagaagatggctggctccagggcaccagatcacttgcatggtgccgggtgccattccttaactgttttgtgtctccactgacaggaccaggaggaacaagcatactttgcagtgtttgatggccatgggggagtggacgctgctatttatgcctccgttcacctacacgttaacttagtgcgccaggagatgtttccccatgatcctgctgaggctctctgccgggccttccgtgtcacagatgagcggtttgtgcagaaggcagccagggaggtatggcatgtccttgtgaactctggctactgctgcactagtcaagttcaaccagtctctgtggttaaaggtacacatcatctaaactatacaaagacacagacagacagacagacagacgctcaattctaaatccagtttcctcttgaggactccttctgtggggcacactgataagactgtaaagcagagtcaggttgtggttttctggctgctttttgtaagtgctgctggctgctggattgggcaggtgagttgtgtcccacccccgcccccgtccccagcccggcccccaccctggttggctacctctctaagcacccttgcagacaagatctggatgtggtgaactgaaaacaacagttttaaaacagaaacagcagctgggattccttccatcgctttgattcgcatgagtaggctgctgtttaccgtgcagagagggggaccttagatgacccctgagctgatttctctcttactaggaagacaagacagaattcatgtcctagctttctaaggctggtcagacctaagtgttttactctgaatgaaatttaggacttccatattaaattctaaaagtaaaatatattatctctatctatttaccattctgggcaatgaaatgtaattatctatgacactgttggatttttagctgggggcaggctaaatagaaaatgtacatttttctacttgtcaaaagtaattacaaattaagatacacacagtaagttaaattctgccacatgactcaaaaatggaaagatcagactattatttggtccgttgtctgatctcatagttatgctataaagcatcagtagggctttgaatcaatcgaagaatgatgaaccacttggtaacaagcaagagaagtatctaccttcacccctaagttcggactaatacacacggtagctataggaaccactaagactcccaggtagaggtggggctgcaaaagagaacccaagatggccacagcccttcccccagctttgggccagcacactgctgggctctgcctttctgaagcctgctgcctctgagcttgggaacaaggtgagcctgggggaatggagaggttggcaatctagtcgccaacatgggacaataatgtctttttaaacctgacatcccgttttctgtttccgtcacttgctgtcactggtgctgtgtctgtcctgccaatgctgctgcataattcagggtcctcccagcagtccgctctctccttcctgtgcttccatgtgctgtttactgctggggaaagtagctattcctgttgtgaggcagccctgcctcctgttctctccagggcatatgcactgaagtgtctttatatcgtgtgttccagagggctgagtttttgaacattctgtgtgggaagacattttattggtgggtgaggatttataacaaacttttcctatatagggaaaaaagaaaagttgtttttctcattggatacaagaagccctttgccacccctgacgtacttgttctaatttgggccaggtccttagtaacagcgttatgcttatttggtggtgactcatgtcaaatggagatgtcattttggtatagtgggatcaagagctttaagtactgtggtagctactgcagtgacatcccaggctgttagctctctatgcagtgttcccaatcaaagctccctaaaaatactctagggaaggcttctctggttttttgtttttaaaggtatataagcatcttcttcagtgagtatatgctgtctcagttccacaatatccagagactggggacatttcttctgtaccaagcaatgctgcaatgctttgtatacacgcacatacacatgtgcatgcatgcacatactcgctcgcacgcacacacacacactgtacaactataccaactcactgattacccagtagttcacaaatgaagcagactagaactggagccatttaagaagaggactgtcgggtgtggtggtacatgcctttagtcccagcacttgagaagcaaaggcaaacgctctccaggagttctaggctaaccagaatgacagtgagaccttgtctcaacagtgaaccaggaagaaccaagacttgagaggtttcacatagtgaacagtattaccaacccttggacaaatcacagaatattccatgtttcaaaacaaacacccaagcatcttctctttcttctctgcccccatgcgtgtgtgtgtgtgtgtgtgtgtgtgtgtgtgtgtgtgtgtgtgtggtggtggtggtggacatgcatgccactaagtgcatttggaggaaaggacagcttacagaaggtggttctttatgtccaccatgttgagtatcaggattaaactaaggcttgaggcttggcagcaagaccctttaaattctgagcattcttacctggtatttaaatttgctaatcaatactttatattttacgagtatgggtatgtatttctgtgcaccagaggcatgcaatgcccatggaggctggaggagacattagatggcctgggactgagttgacatggttgtgagtcaccatcatatgggtgactcaaactggggtccactgaaagagcagcctgtgcccttaatcactgagccatctctattcagtcctcctaccagccctttaaagaaaatgtttacttaaaatgaaacataattatccacgttgtgcatatcacagatcaagtagacttgtgtttataaacaaaaatatacataaaactctctgagccaggcacgatgcttaatcgcagcagaggcgggcagacctgtgtaagttggagaccagcctggtctacacagcatgttccaggctgctagggttacacaagtgaagacctcttttcaaaaataaaataaaatgctctgagacacatgagtttgtaatgtgaaattatgttacttatagtctgcctcaaatgcagcttgtattaattataaattgctccgcaaggaggattttctgtctttattttctttgactctggtcttccattatttccagagcttacggtgtgggaccacaggagtagtgacttttatcagaggcaacatgctccacgtggcatgggtgggcgattcccaggtcatgctggtaagaaaggggcaagctgttgaactaatgaaaccacacaagccagacagagaggtatgtatgatctgttccaacagagcatgtcataatggcagctctgtagttcttaattgggattctttgagtatgccctcctcctaaaggagaaatacagaaagcctttacacaagctttctgatgttgggcagtatatctacttactgtaaagcagatgaataaatcctgaatgcagttatttgatttttattgcactgctctttaggatgaaaagcagcgaattgaggcccttggaggctgtgtggtttggtttggcgcctggagggtgaatggaagcctgtccgtctccagagccatcggtaggaaaacatgaatctcctttctccaggttcctagctcgtcgtgttgtgttaactttgctatgaaggaacttcagatgctgtttatatgctcagaatgcttatcattgtttaaaataacaaccagatgactttacagttatttaagtccacctggctatttatacatttaaaattcattataaaataagactcatgtcaaggaatattgaatatcagtttctatttttttaaataggagcttccaatttagtgaaaaatctgcttaaaaccaatgattgcttcactccattgttgcagaaaatgggaggttctttccgaatgtcacagtttttttggtgaattataaagtgacatgaacagaattctttaaaacacactttttatacaaaactattttctaaatgtggaaatatttagaatgtatatatgtatatatatatatatatacacacacagttttatgagagagggtctaagcagaccaacctggactctgtcttcgcgtgctggtattaaaggtgtatacaccacacctggcccagaaaatgcccagtcagatcatctcgggctcaagttcactttttctttttccttccctccccattcacaccagggaacaaacccaggccttcatgcatgccaggcaagctctacacacgcaggtgcacttccagcactaaagaagaattggtctccctaagacttaagccttttaaaggggtgaagctactataaaacagcttcaacaggcgactgtctgtacaaagttgtagacgtaacttcaaggaatgggctgtgcctgcctttgtctaggtctgggctgagtgtgttgtcaggcttcatgggttagcttctcttcccagctggcttttcttctctgcccagtgtcacatgtaaatacaattagtgtgttgctcatgtgtatgtgctggggctgactgcttgggactgccagcatttgaaaaagaatacatgtatgtcttcatgggtaaacaggcagatatttttaaagaagcaactgaatatagacaaagctagcatacacaaaggtcatatctaattactaaactagtttatcattaccaaagattccagaataagacaaccttaaagattgggtttagtttcactggtgattcgaatccttcctactccttgaaaagatgctggcaaactgttaagttccccgaatatgaacatgagaagctaagtgaatacaaatacctcatgaagaacatttttttctttacaataagggagcaattagttactgtggaacaatgccaaaagaggggaaattctcaagcctaaaatatcctcttaggtacaagtatttttgacaactagaactggtcaagaactcttccttctgagagtgttttgtcaggacactgatgtatccccacagaggcaacctaacgggtagatgccggccttgattctaaaaatagagcacaaggcgaaaccaaagcagcacttcaggaagcgacacctaagacagaataaggtcgacatcacagataaaatgactttgcaggtagatagggagacacactatgtttaaggagggaaaccccaggatataaatagttttaggagtagcaatgagtactcaaggtgagagcagagggtgaactggtcaagagaagtgtctctgccagcctgtgatggtctggacggcagtgagtgaccaagcagagtccacatgagcaggcttgtctctccaagcactcgcagttataggcagagggaggattgaggcgagtgtaccaggcctagaagggagatcatttagaaggcttgtgggaacagagctggagacgaggccatctaaaacgggagacacggaggaggctataaaccggtgagacagatgatagtttgtgaggaagaggaaagctaacttccaggtttctgacttatgagtgggaagatgatgaagcatttgtaataaagcagcagcagttggtggggggggggtgagttcagttgacttattttcaattctagctactgatgggtttcaattctaggtactgatgggatgtcttggaagagattttgtatatacttagaaatacagatttggtgtttagctgaaagttctgagttggacataaggatttagtaactcatcgcaccttggcaatgctattgatcatgtgtgcagccaatgttgaaactacaggtatgagtaacaattcccagaggatacatcagtgacgtaaggcaacacagtgggcagacacggtttggataatggctctgccactctgtaggttactgatcttgggaaggcagtgtctcggtactgtttgctctttgatgaagtgagagcactggtatccagttcctgattcacgtgtaaggtggctatatacctcattcacaactgggtctgacacactcatagcacacaactgccctactcttaaatcaaggaacaagtcaggaaaaatgagtgacagagcagtgacttgttcagatggcaggaaaagagggcttgcagaagtcaagggttgcagaagtcccatgtgagaaataggttgaagaaagcaatggtattatggactagagacagggctcagcagcaaagagcatgcgtgtcttctgcagagggtccaggcttgactcccatcactcacatgagagctcatggccatctgtcaatcccagcttaggagatctgatgcccccttctaagagcttcaggccccaggcccacatgtggtgaacatacaaacacagaaaaaacattatacacacaaaacaaatcttaaaaatgaaatgcaattttaagtagggaataactggtagtattgaagagaaatgttttcaattggtaagtgcaagaacacactaactgagatatggaagggcatggtggtccatgcctgtcatcccagcacttgggaggctaagatgggaccgaaaggaagtttcaggcttagctaggctacatattacagtgttgaaataaaaagtagatttgaatatatttataggaagagagttaaagaaaccaacaacttgactatgagagagggtagaggtcaactctgcatactcccacccacaccaaagtattaacgaatccgccaagagcctggtgaactggactaaggagttgaggaatgtaaggtttgggagtcattggaatgggctgaaaggtgcaggaaagggcctaaggaacagttcaactccacttaaaaaacaaatgacactaaagctttgacaatacaaagcttgtcaactgtttcacctgagccctgcacttctgagccaaagctgactgaggctcggacatttcctagcatatggagagaggaggactaagataaactgccaccccccaccatggaatgcatgtttgtgccctcctaccaaatttgggggcgaaatgtcatagatctgacactcaacatgagagcaggtgagaagccagactcttggcagcatttcctctgcagatctttgcatgttctcttctaaactgacagttgcaatggtctctagttgttagcactaaaacaacggtttttggaacagtatgactcagatcacatttatttttagaagtagagttcagaaaatatttcaatcaggtaaaataggagagatgagtgaagtggactggtggggactctgaatcctgcctgtgcaactcgcttcaacagtctgtgggctggtgagagtggtagtgcacacttaggattccagcagctgggaggaggcgggcggcaaggggatcaggcatttgtcttggctgcaaagcaggctagaggccagcctgggctacgtggatgagatgaccttggctcaagaaaaaaaaaaaagaaagaaaaaataaaagtggggaggatagtgaagttgggaatatataggatcaaaaggccctctttgcagatttcttatttacagatacattaacctaaataggtatattagtaactagtcattttcctggtatataggcactcaacatgctggatacagcatatgacccatatagttttatagcttagccacaggggtcctattgaactcttctgagcctgacaagcttgaaagaaatctgaggcaagagggaacttacagcagatacatgtggaagagctaggatctggagctaggcaggctgatcccagtgctgtcctcaacactaagctataggggactacttcacatatgtttggtggctaagaacaaagtcagctcttttccaagcgactataggaaaacaatgcaggatctggtagtgcctgcaatgtaaaggtctgaaagcatgagaagatgggtgacctgagcagtgtctgcttctgttgtttgtaagtgtatggggtcgggtgaacaagggcaacacaggtgggtcatctgtgaagacatgaagacgcttagtgtagattttctgtccattctccagatattacaagacattaaacaaagcatcaaagagaagccaagtggacccaataccaagggggctataatacaggcctagctccatatgtaaactatgcataaaaccacaagcttccttggccttagggaaatcacacttggctttttaaatttttatttacattggtgttctgcctccatgtatgtctgtgtgaggttttcagattccctggaactagaattacagacagttatgaattaccatgtgggtgctgggatttgaacctaggtcctttgaaagagcaggtagtgctgctaactgctaagctatctctccagtcccttgtaactcaaaccttcctccatgttcacaacacaaacctacttatcaatgtcttaaaaaaaataacagggaattgtttaatgaggaaaatggggagaacttaggatttttccactacaatattctcaagctgtaaataaaccaaacaaatctactaaactaagagtactcctatatatgactgatattttcagtacagcagcaaatttagacttgatgtgattgttgctttcatcaaagtacaagtctgagaatataaagccaaagaggaactgagccctgcaactagcaaatataaacagcatcaaagtaacacaggactcaagtgtgtcgtttacagttgttaagtaaaaatttcccatgaagttactccagtattgaccttaagcataccgaacattgaggtgagccacaacctgccttctgacgctcggccttcccttctactccccaggagatgctgagcacaagccgtatatctgtggagacgcagactcggcctccactgttttggatgggactgaagactacctcattctggcctgtgacggcttctatgacaccgtgaaccctgacgaggcagtgaaggttgtgtctgaccacttgaaagagaataacggagacagcagcatggttgcccacaaattagtagcgtcggctcgtgatgcggggtcaagtgataacatcactgttattgtggtattcctgagggacatgaacaaggctgtaaatgttagtgaggagtcagagtggacagagaactcttttcaaggagggcaagaagatggtggggatgataaggagactcatggagagtgcaagcgcccttggccacagcaccagtgctcagcacccgccgatctaggctatgaggggcgagtggattcattcactgatagaactagcctcagcccagggccccaaatcaacgtgctggaagatccagactacctagatctcacacaaatagaagcaagcaaacctcacagtacccaatttttgccaccagttgagatgattggtcctggtgcaccaaagaaagatcttaatgagctaataatggaggagagatcagtcaagtcatcattgcctgaacggagtggtgctggagagcctcgggtttcttttaatttgggttcaacagggcaacagatatgcagaatggagaacttgtctcctgtcagttctgggttggaaaatgaacagttcaaatcccgggggaagacagcgtctaggttgtatcatttacgccaccactactccaaaaggcagcgtggattcaggtttaatccaaagttttactcgtttctgtctgctcgagagccttctcacaaaataggcattagcctctcctcacttactcgaagtgggaagagaaacaagatgttaagaagttctttgccatggagggaaaatagttgggaaggatatagtggaaatgtgaagatcagaaagcgtaatgatattccatgcccagactttccctggagctataaaatttaagactttttcttcaacataggctagctagttctctcagaaatataactatcagagtagaaacaaggtagacatttttaacgtacatgtgcttcattatgaatccacggatggctcaacccttaaatgtacatagattgttaggaaattcaaaatagcattttcaatctaatcaaaagtattggcggtttcactagagaaattattcaactggtccctgtgatgtgtctctataccacagacagcccctctccaccatcccttcacgtcactagtggaagcttgaaagttattcgagtcagaatatatggtatggaaatcgcaactatctggtctgatgtgcctactctaaaggaaacaatgcagaattaaattttgttgggaaatgtccctcaagatcttggggactatggagcatctcttcccaattgtgtgggtaggtgaaagcctaaaagccacacgggcctaaactgctgatgagacgcagtaagccggtaccaaagtgtcatgttctcagacttgggaggcaggatacagtaagatcattcacttttcatagaaaatgaaaggcaactatgacatttttaattaaaatacttcataaggttttagttatttgaacgttttataacctgttatggtgcttttgatgggattttgttacttggcattttaggagaccaccatcagctggttgtaacctatgatgctaatgtttttcacagtaccttcatctcaggaataaagtggtttagcagagatgatgtgaggtacaatataagaatcatgccatttaaaaagagttgtgaaatagcatttctatattttctgcttttttttatgtttacagacagcaaaggcatatattattataatataaaacgtagtttggagaatgaaaaaaatgatagttttaacttctctaaaattgttttccccaagggaatgaagtaattggtatgaaggaggctgagtgtgaacccagaggccaagtgcaaaggagaatgcagattactgagagccagggctgtttagttataactggaagacaagccagagtccagctacttgcttcagactacagtgacaggtcatgtgcttctcatttcaatacttaagttatagtttatatagttttaaatcctttcaatacttaaggtatatagttttaaatcaaccaccttctgccatttcaaagtttcaaagcataaagacagcaagtacgcgatcgtatctgttcagtgaggcagcctggtttctctcagccatgaatgcatccatgtcctcatgttccccaccctcacccccaccctgggccagtcaggccaacaggcaagagtagctgctagagccattgctcccagtgcaggcactgctaaatgttcttgctgaggcactgctgctcctatccacggtctacgtaacacaattcatgctgcattctccagacccacagagggctaagattcccaaatttcaagacatagatgactaacatatatcatggttacatcaagttgttaaagagaccaaaactcagcttctcttcagcaatggttacactgttaatctatagcttttatttttcaaaacttgagagtaagcggagattctcagtgttttctgttgaccttggagtcggtctacccctctccgacagtacctgtgatacacaggtggagaggaatacccgcggctcctcctcagcagtgttaatttcatcctcctctctctcatgctctgcctacacatggccctcacacatggttgttgttttttgaagcccaggtcttgttgacaacccatcaggtacagggtcactttcaaaccaaaatttctaagaaaacaaggcagcagaacacagatgaacattcatatcccaaagtagctaagatcatctgtggttacctgttggcaatgattttgatcagaatgaggagaaaagaaaaattttgaggtgatataggcttatcagtggggtaaaaaaactgggtggatgaaaccgggacaaacagacccatttgaaaggtctggattttgtaggtctgactacacagcagtgttaactccatttctcatatcactagctctctagaaaatagagaaaagtatttctagtgtggtcaagttaataaaccaataatgtaaaaactaacttcatttgttcacaatgtgcgtatttataaggtagttaggtaccatttgtaaggtaagtcctttaacattctataatattaaagtagtggttattggcctgataaatgctgctgttggttctataaaccagacaagaagcagtgctttgtgaaatgcagtgttaaatcttaatgccactggtgataggaagtagttcccttcagttcaaatcctctgcccttatttgctgcttgctaatgtaagcaataagtaaccctctaactaacggtatctatacatttctgtaacttatacttaatgatggtgtatctggtgattgtacaattattagacagatataaaagtatctatacaatatatattaactgtaaatgctgaggtatagtctgtgaattatgtgttttgtacctctatttctttgtgcaatttagtggtggtgaaagttctacactcgatccttaaagagtggcagtatcactttttcaattaacatgatctgcatcaatttgtttgcttgctaaaacagttttgttaaagtaggaaatagcaaaacaaatataaacaagaaagtgtagtatctgataggaaagtagacaagtcaccaaccgagattactactccttgtacattcactgtgagtctcaaagggcatcagtcccgaatttcaaaggtttctttttttcactttttgagacatgtatattgggaaggataactgagattggcaacattacagcaccaaatactggggctattagtaatatttatgtctgtacaacagaggtcagacagaaaaacatgtatataccttttctttacctataagtgccatccattgtccttgaagtaatacaattaaagtccatgttgcatttaacagaaggagccttgaaaggatcatcatttcaaaggacaatgttagtaatgtcaacactaagtctagtcctgaccacagtcgcctggtacagcagcaccgctccatttccatgacaccacactccattgctagaacactgtgccagtaagaggccggcatccaaggggcagatggacatgatgcgtgacgcagctcagggttgcggacaagtaaactgctgtgcttcaagttcttcctccccaccaaaggcttcctgaggctttgtgagaaaaggtctaaattattttaatttttaaactcaatttgttcaatgtgcttttccccctaagtacaagaggatactatagttttgttcaaacctttgtttggggaaattttctttggattataagttactaaaagatttttttcaccttttaaaaccaggataaaaaaacaaagccccaacactctcctgttttgatctatgaaaagatggttgtttcttcaaaaccaatgacactgccagtattctaacagccaaatcgtactgactgaaggggaaccccactgctgcacctgccagcagcacttgaacagctcaggcctgttcattatactgagtagaaacctgaaggagggcagggggttccaccctggcgcagcagtcatgcttgaaaaggaagtctttaactctgacgtctgaggtaacgcagatacagcactgtaatctctctaggtgctctttggtgagagacgagctttctcttgttcaggacatttctctgcaaagaattctctctggagtgaagtgagtgacgttacgatttacaaacccactctacagatcacttttgagttgagttgtaatcataagtgatccttatttttatttattaaaactgtttattcaggtaaggagtatgttgaaattttgccaatatcttaataaaactcagcaattaaaaaccaccggttatttgtcttattcttagaggacagctgagtcagttgtaaagtctttcagtcaaacacgccccctccaccagcctgcctctagaatgttgggattaagggcatatgccaccactgcaaagggtagatttcttataccttatgaacactgaaaactgcaaatcttctaagtgctgctttaactattatcatccacccccccaaaaaaaacccaaaaaacaaaaccccaaacaaacaaaaacccagcactcacacacggggcttggggtggggtggggacagaggcagatgtctgtgtcccctgtgcttcccccccactggttcaactggggtaggaaagggggcagatggaagagacagaaggacaggtgaactggccccgagctaaaggacaccgccaaagaccagaagaaaacacagatactcacgctatgataaggggagcaaaattacagtacggagtaatgacgagaatgattttatggctgggggtgaccacaacatgggcaggaactgtgctatagggcccagcattggaagagaaccactggttttaagggatggacccaggtaacatgctatgactgccttactagtaagacttatttcacacaatgttaaactcctaatttcttgatcattcagtcctactgtaactttacataaagttctgaaaggatgacatattttaggaagaaagaacattttgattaataactgttatttgtttgaaaaatcctaaaatttgataaagatgaggacctctttctgaagtaacatgccatatatattataattatgaagtaaaaccactaaggtataacaattatttgaattagagctttcttaagatacctgttaccctaagaacaaccagtagaaggctcttgtttgtgctttaggagccagcgttttcgtttctaagtctccaaactctttgaatattgttcagtaataaagagtccctcctttagcaggtgggtttagtgttcctcttagcgtagctgtaggatgatgctccatcacagtctccaggtaagatgtgtcctcgcacacagcttctgtctagtttttcttggaaagctggcaatgtacacatttggagacgctcttttcccaagagagaacagtgtgagtggagatgacaaggccctgccttcacggtagtcacatgagagccagaactcaggggcgctgagcccagcggagcggctatggagttgccagtggaggaagaggtgggactcaatgaaacaagcctactatgcaggctctcctagaggaaacactgcctgtcaggggttcttgtcagggcagagaggcaacaggggctcagcccctattgcgtcagccagagataaagttttcacaaacagcaatccaatggatatacagcccaaactacagagcagcaaatagtccttactgtgtgctcttaagcttcctcaggcagagggggttttgttttgttttgttacttctataaatactgactggaaaaccatgcgtcactggctgatgtgaaaactagagacatgatgagatgcattaaaatgccaccagggaaaaactgcaaagaatagttctctgtagttccaagtcccaaggctgtggtttggccttctatgttgctgacagtggctttaaacttgactattttctaaactttttatagttagaagcaggagagatggctcaccataaggatgcatactgtttttccgaggaccttagagttcaattataaacatatacatgcgggtagctcatgaccactaaattctagcttcgtgggatctgacaactctcacctcagagggtacacacacacacacatagccatacacaggaacacacataactgaaaacacacatagagtttttaaaaaatagttcacatctctgattcatgatttaaataaaataattacactatcaaacttggcatgatggcacacatttgtaatcctgcacttgagagaatatcagtttgaggctatcctgggctataaactaagatttgatcttaaaacacaaagacccaatatcttactttataatccaggatagcccacatacttttcatgttttttaaacagtggtatttttactgtctgagatggagatgagaacgagcccctccccctctcgtcaactgaaaaggctagattaactgtgaaaagatgaggcttaagaaaaatgaagtgtcctaaggtcatcaaggaggcatgagatagccttgctactctatctataagttatgagcagccactagaaagaacacttgagtgaaacagtaaaggcaggagacacgatgtcccacaggggactctgcaggcttttctttacagattcccaacaaagacaaggaagggtcctaactacccagaagagacacagcagactagggaaaggaccagaaaagacagacagacagacagaatgacgttcctcacatcagggagtagttactggagctgatggaagacaaaaggaaagaaaacccaacccttggaagggataagaatgtcaccaggcctacaaagacaaggtagaaagtaaaatgtgaactcctctcccaatctagacttaattcctaaaaatacagcttaagcaaagcacgccagccatgcccagccccaagtgatggtgtcaaccaagtgacaaaagtacaagagaggatccaggagtgtcacaggggcgtggtgtttgtctgacacaaggaagaccctgggttcaatccagcatatcattaaaaaaaaagtctctaaggtgcagcatgaaggacgatactcactcaaggtcaaagaagaccctgctctggcactgtaatcccaatcagggatacagtgtgctgctattcgaacttaagctcaccaagcaccacatctaatcagaatggcagaaactccatcagcatgggatgtgaactggtgtaaccattatggaaactggcatagagggcccataaaaactaaaaatatagctaccacatgctacaccactgctggctgtacaaagacttgccccttaacactgagacatgtgcatatctaccctccccgaacactagtcacaatagccagggaataggcccagcctagagccatcaacaggtgaacagacttaaaacaaaaacatacattaccaatacatggaattatcttgaactctgaagaatggaatgatgacattagcaggatgatggatggaatttgctgaacaaagaaatgggccagactaggaaagacaagtgtgttctgccatatgtggaatctagaaacatacacatgtgagttcattccctaagacataaaaaaaaccacacacaaaactagaaaagggatcatgagaagaggagatgttaaaagggcaacaggaatgtatgtcctgtgaaagcaggaagaggaccaggaaggagggagagtgtggggaaactgggcattgagtatatagaatgtcacagtgaaacccattactttcttttctagttaaagagagactgaaaaagcaagcgtatggaaatataattgaaaaacatctaacactaacaattttagtgtttctggggcttaagtggaatctgatgttgctgatagtcaaaacagtacaagtttatctgctttttacagttcagcatacacttatacatgactcagtacaaagaattttgacaccaccttctcatttaggtcaaatacaggttttgggcacagccataaatgaacctgctttaaagaccatcttcaaggccagggtcccaggccattcttctacacctgaccagatgactcccagtgtggaggtttccaccattaaacctgtttgtaactcactagaacaccgaacagaactcagagaagtttcattctcaacagaggacacaattatgaaccagcctaaggaaggcgcacaggggaggttgaaggtcccaaatgtgatgtttcctgttccagaaggtgaccttccttggcacactgacatacagtggcacagtgccaacaagctggcatgatcattcaggattctagaacccagtgtgtgtgtgtgtgtgtgtgtgtgtgtgtgagtgtgtgtgtgtgagtgtgtgtgtgtgtgagtgtaattccattagctgcctggaatcagatgatctagaacattatcagcatattacactgttggctcttttggcgtttcaagccccatcctgagacatcttgtttgaataaactaccagcttccaactataaacaactcctgtcacataggagagtccaagggtttagaggctacttcccagaacatgggctagaacagcccattctatattattacaaagctgatgaccctattcataaacatacaatccccttcaaaatgaagacagctcatataaaagtctcataagaaacatgctagactagaaatgacccaaattctttaagtgggtgaatggattacactagaacaactagtagaatactacttggcaaaccaagaaaggaaacagtcatacaagatggatagacataattgttcttactacacaactatatactctgtgagtctatgtatatgatgctgtgaaaaggaaaaattaaaaggacaaagaacagaaaagaacagtggcagccagaatgctgggagaagtttccttgtaaggggccactgcagagaatccttaggaaaatggaaatgctctcggcagcactgtggtggccatacaacatctgcaaagccagaaggctgtatgccaaaggactacagtttaaaggatgtaagtcaaaaaaaaaaaaaaaaatcaccagaatgtgtatataggtgaagagaacgcagactgtaacaatctgtcttagcagtgagtctcagaatcacgatatagaggacagtaaagaaagctgagacccaaaaaacctgagaagccattttgacatggtattctaagagtctcagggttcaggggcagcatgcagctacctaggaagctgggggaggagggctacatgagcatgggcatgtgaaccagtctggggcagtatgtagatctccatctcaaacacatacacgcaagtgatacaaaaggtagttttttaatcacaaggagataggtcaacaataataatagtgttagaaagaaagaaaacagaccattaatcccagcactcaggcagcagaagcaggagggtctgagttcaacccaaccaggtctacaggaccagccagagcgattgagaggaaactgttttgataaaaggaaagaaaaaaattagtgtgctcaagttaaagaactgagtgtatgtatgtatgtatatatatgtatgtatatgtatgtgtgtatatatatatatatatatatatatatatatcagtcaatgatccaggctccacatggttgggtatttataaacaggagcaaggcctacaattagccctgtggggttggtctggggtacttattgacccacagtttctctctagaaaacaaagtaacaacaacaaaccaaacagaaaaatcatgttagctgagtaaagaggcacacgtcagtaatcctaatatccaggacgctgagtgaggcaggagactgcagtttccagaacagtgcgggcacgttaggacggcttatatgcatcctcatccaccggctgagaggaacatgatattacagcagcagtaagcacatgcctcattctcacgtttgcttttaacatgatttccccatacaagttcctcagagagttgaatcatagcttagctgagcactgtgacacctttaatctcagtacttgggaggcagaattgggtggatctctgtgaggtcaaggccaactaggtctacatagcaaattccaggccctggatgtaagacgaatgtgaagctgagagggtagctgagttggcagtatgcacaaggccctggttcaaacccagcccttgttaaggatggtggcacaggcctatactcccagcactcctgagctgaaggctggaggatcaaaagggtcagaaattcaagattatccatgtcatctacaacaaacctggacatgacaccctgtcttaaaaga

SEQ ID NO: 1444 - DNA, 1842 bp, Mus musculus
atgtattgtggcacattagagtatcgcttccgagttcttactgaggatagcttgtgcttctcttccagtaactgcccttcctttctggctgctgctttagccagagccacatcagatgaagtcctccagagtgacctttctgctcactgtatcccaaaggaaacggacggcacagaagggactgtggaaattgagacagtgaaattggcccgttctgtcttcagcaaactacatgagatctgctgcagttgggtgaaggacttccctctgcgcaggaggcctcagatttattatgagacgtcaattcatgccatcaagaacatgcgaaggaaaatggaggacaaacacgtctgcattcctgactttaacatgctcttcaacctagaggaccaggaggaacaagcatactttgcagtgtttgatggccatgggggagtggacgctgctatttatgcctccgttcacctacacgttaacttagtgcgccaggagatgtttccccatgatcctgctgaggctctctgccgggccttccgtgtcacagatgagcggtttgtgcagaaggcagccagggagagcttacggtgtgggaccacaggagtagtgacttttatcagaggcaacatgctccacgtggcatgggtgggcgattcccaggtcatgctggatgaaaagcagcgaattgaggcccttggaggctgtgtggtttggtttggcgcctggagggtgaatggaagcctgtccgtctccagagccatcggagatgctgagcacaagccgtatatctgtggagacgcagactcggcctccactgttttggatgggactgaagactacctcattctggcctgtgacggcttctatgacaccgtgaaccctgacgaggcagtgaaggttgtgtctgaccacttgaaagagaataacggagacagcagcatggttgcccacaaattagtagcgtcggctcgtgatgcggggtcaagtgataacatcactgttattgtggtattcctgagggacatgaacaaggctgtaaatgttagtgaggagtcagagtggacagagaactcttttcaaggagggcaagaagatggtggggatgataaggagactcatggagagtgcaagcgcccttggccacagcaccagtgctcagcacccgccgatctaggctatgaggggcgagtggattcattcactgatagaactagcctcagcccagggccccaaatcaacgtgctggaagatccagactacctagatctcacacaaatagaagcaagcaaacctcacagtacccaatttttgccaccagttgagatgattggtcctggtgcaccaaagaaagatcttaatgagctaataatggaggagagatcagtcaagtcatcattgcctgaacggagtggtgctggagagcctcgggtttcttttaatttgggttcaacagggcaacagatatgcagaatggagaacttgtctcctgtcagttctgggttggaaaatgaacagttcaaatcccgggggaagacagcgtctaggttgtatcatttacgccaccactactccaaaaggcagcgtggattcaggtttaatccaaagttttactcgtttctgtctgctcgagagccttctcacaaaataggcattagcctctcctcacttactcgaagtgggaagagaaacaagatgttaagaagttctttgccatggagggaaaatagttgggaaggatatagtggaaatgtgaagatcagaaagcgtaatgatattccatgcccagactttccctggagctataaaatttaagactttttcttcaacataggctagctagttctc

SEQ ID NO: 1445 - protein, 600 aa, Mus musculus
MYCGTLEYRFRVLTEDSLCFSSSNCPSFLAAARATSDEVLQSDLSAHCIPKETDGTEGTVEIETVKLARSVFSKLHEICCSWVKDFPLRRRPQIYYETSIHAIKNMRRKMEDKHVCIPDFNMLFNLEDQEEQAYFAVFDGHGGVDAAIYASVHLHVNLVRQEMFPHDPAEALCRAFRVTDERFVQKAARESLRCGTTGVVTFIRGNMLHVAWVGDSQVMLDEKQRIEALGGCVVWFGAWRVNGSLSVSRAIGDAEHKPYICGDADSASTVLDGTEDYLILACDGFYDTVNPDEAVKVVSDHLKENNGDSSMVAHKLVASARDAGSSDNITVIVVFLRDMNKAVNVSEESEWTENSFQGGQEDGGDDKETHGECKRPWPQHQCSAPADLGYEGRVDSFTDRTSLSPGPQINVLEDPDYLDLTQIEASKPHSTQFLPPVEMIGPGAPKKDLNELIMEERSVKSSLPERSGAGEPRVSFNLGSTGQQICRMENLSPVSSGLENEQFKSRGKTASRLYHLRHHYSKRQRGFRFNPKFYSFLSAREPSHKIGISLSSLTRSGKRNKMLRSSLPWRENSWEGYSGNVKIRKRNDIPCPDFPWSYKI

SEQ ID NO: 1446 - DNA, 249809 bp, Homo sapiens
  misc_feature (1)...(249809): n = A,T,C or G
cctctggttctatgcataccaattatcaaccagttgataactggatttccccagagactttgggtatagccagatcaatgcaaatgtctggtctccttggaattaatagttctcactgtaaattcatatattgttattgtgattttgatatactctcgcgagatttacattagttaatatccctccatttgattaaatttggagcactcatttctgagcctccaagttcaagttgctgaactttgtcataaattcatgaaggtaaatgtcattatggtaatttaaaacaaattatttgacacttttcccatctggaggtggggtgtattatgtccccttctcttgaatctaaaatgggcctcttactgctttgaccaatagagcaccataaaagtaatgctattgacatatgagactaggtcatgaaaggctacgcatcttcttaggcactagaacactcactcttgaagctctaaattactatataagaagtctgactaccctaggccgtgcacggtggctcacgcttgtaatcccagcactttgggaggtcgaggcaggcagatcacgaggtcaggagttcgagaccagcctggccaacatggtgaaacctcatctttactaaaaatacaaaaattagccgggcttggtggtgggcacctgtaatcccagctactcaggaggctgaggcagaagaatcgcttgaacccgggaggtggatgttgcagtgagctaagatcgcgccgctgcactccagcctgggcaacagggcaagactctgtctccaaaaataaaaataaaaaagtctgactatcctaaagccatcatgctggaggtgttatgtgtaggcattacagttgacagccctagctgaactaacactcagcaaccagcatcaatggccagtttggcaacacaaattagtatcttgaaaaatatttacatattaatcatttctcaactctatttttttcagtataaatggaaaggtataatgtaagtcatcttggacatctagcccagttgagccttcagatactctccccaactgttaccttattgccgcttcctcagaccttcaagtgaaaaccacctagcttgagtccagtcaacctacagagctgtgagatatagttaaatggtttttcttctagccactaagttttgggatagtttgttttatagcaacagataagtgaaacagctgcctgacagcctctctgggtgggttaccagatattcccaagttgtgtctttaggtgccttcttagaatttcagatcttcctgtccagtgtcttttagctttttctgttcatcttcatttctactaacaccattcttttctgtactcttattatctcccattgcccaactgattccagccttcaatctctcttcttcaatccatcctgcattcatctgaaagaatgtctgcatattaaattttcttaaaacacagttttggttgtatttctttctaaattcagtatttttgtcaatacttagaataaataactgcaattccatatcccactacagcctagatctaatcttgaactttttcccataggctttataaccttaaagagtcatgaaattattggcatgtatttccagctatacaaatttccagaattttatatgacaatttaaaaggatattttataaattaataatttcatgtgtgaaggactcaagttcagtttgcatatgtattttgatttgctgcctttgtgcaaataactgcaatgtattgtattattacttaggtatatggaggttcatcaaatcttaatcttcagcttgcagaattactggaaaccatgtgtgtgctatattggtgccagatatgtcatttatagatcactctttcataaggcagcaaactacttcctatgcccaaatcattttctttctggaaaagatacattttgtcagcatggttaccatgtgtggtaattgataatgtctgtgccacatggcttacttctacccttgtccgacacagctattctaccacctatgattaccatatgctacagcactctgggttaatggaatcatttccatcttcccttctagtcacaaatgtcattgtggctcaattccatcagctcaactaagaataaaatattcagtactatctaagcaaagaacacacctttgtgaagttttcatatttagttgactgtttcattttcatttttaaaagctaggtttttttgatgaatgttccagagtgaggaatgggcatctgctaactagaataggacatgatcaatgtcactctgaattcttgcatgtatttattttaaataaatatacaaaggtaattaaaaattagatgataataaaggtaaagtttttaccaccataaagcatttttttgtaaagtgaaaactagtagcaaaagattgaagtggatttttaaaacagtgtcaatttattttagaagaaccatttattatagaaggaacataccacatgttagccatttatagcaccatcatcaaattactatcaaccactgccctcttcttcttttgtaagtatgtcataataaataattttggttcctcaaagaaccatgctagataaaaagaaagattgttattaatggtttaaacaagaaaaaaggttagaatctgttttggggatttacttctttgctttttaaaactagtaaaatacagtgcatgtgggccagttattacctgatgtgaattttaattttgacagctttgaattattgctgcaatatgaccatattagccagcaacagaaaaggaataaaaaattattatagcagtagtatttttggcagcaaatgggaatgatttttatattattgatctgggatgtagaagaggaagaagtttctatttgaaaatgtttctatgttgctcagttttttcagttgtcaggtgttctgttgcttcctactagtcaatttgacaacatagtcaaattaatattttaaaaactattggccaggtgtggtggctcaggcctgtaatcccagtactttgggaggccaaggcagacagatcacgaggtcaggagtttgagctcagcctgaccaatatggtgaaaccccgtctctactaaaaatacaaaaattagccaggtgtggtggtgcacacctgtagtcccagccactcgtgaggctgaggttgcagtgagctgagatcgcgccattgcactccagcctaggtgacaaagtgagactctgtctcaaaaaaaaaaacaaaactatttatatcaagcctgtctaacctgtggcccatgggccacatgcagcccaggacggctttgaatgcagcccaacacaaattcataaactttcttgaaacattatgaggtttatgcatggacttttttttttttttttagctcatcagctatcattagtatcttttatgtgtggcccaaggcaattcttcttccaatgtggcctggggaaaccaaaagattggacacccctgatttacatattagttatccttccattcagtttttaaaatataaatttaaaatatacattttaatatttgcaacttaatatttatcattaggcctagccttaaacatttacataagcattaattttaggccatgggatatgagctatatataatttgttattatactctctccaaaatataaaatgccaatattttatgttaacataaactatgttttactatttgagatattatattagcttcaaatcaatggttttttacaactagcaaatcaaaattgagggttttctggaaatagtgtttctaattctgcctatagataaaagaggcatactttagaatagacagaatattccagacttgcataatcaagccaatttttttcctgagacagggtcttgctctgtggcccaggctggagtgcagtggtgtgaacatggctcactgcagccttcatctcccagactgaagtgatcctcctacctcaacctcccaagtagctgggactacaggcatgtgccactatgcttgactaattttgtttattttttgtagaggtgaggtctcactgtgttgcccaggctggtctcaaactcctgggctcaagtgatccttccaccttggcctcccaaagtgctgggattacaggcatgagtgagccactgtgcctggccccaagctaatattaattgaagataaactgagaagttatagactgtttttttaaatcagctttgatagacttcttagttataagcatcaattgtttatatatcaaatattttattaacttacagaaattaatcgactttttagagcagtttcaggcttacagaaaagtagaaaggacagttccaatatatgccctctcccctcacttacatgttttctcctattattaacattttgcattattgtggtacactagttacaattgataagccaatattgatgcactattattaactaaagtcaatagtttacagtagggttcactcttgaacattccatgggttttgataaatgtataatgatatgtagctaccattacagtatcatacagaatagttttcactgccctaaaaatcccctgtgctctacctattcattcttccctccctcccccagaacccctggcaagctattcttctaattccaggaaatcatttactgctaatgtcaagtaaactcagtttactttggagacctaaacttgctttaacttaactaatttatagttcttttatatatacaatccattttattccttaaagtattatttgttactatgtcagtcaggatctagttaaggaaaaagagaatggggtgtagtggctcatgcctgtaaccccagcattttgggaggccgaggtgggcggatcatgaggctaggagatggagaccatcctagccaacatggtgaaaccacatctctactaaaaatacgaaaattagctgggcttggtggcacgtgcctgtaatcccagtacttggtaggctgaggcaggagaatcacttgaaccagggagtcagaggttgcagtgagctgggatcacaccactgcactccagcctggcaacagaatgagactccgtctcaaaaaacaaaaacaaaaacaaaacagagaatccaggaaattggttacacaaattatggaagagctaaaaagccaaaaaggaaagattcacttctctaagtcctaaaagattagaaagctgaaagcttctaccatccctaggctaaaggacaaatgggggaagatgttgttctggagctgaggggatagggtcactggcaaaagctagagaatcccagtgaacatattcatggggaggaaagctacaaaggaaatgcatcaggcctcaggactgagctagggaacagggcttttcttctttcctcccttcttccaatttcttgtcagtgcctaccactggacaaatcccaggtgaaagtcagctgtcacagtagcctagtgaatacagcctgaaagggtcagccctcctacaatacagagcagggcaaaggaggagaaagaataggtatgagggcaaaatggacaaggactgacacagtaatcaattctttttaactttaaaaatcaactttattgaggtgtaatttatatacaatttatatacaatttatatacaatttatatacttattttaaatgcagacttggataattttttttttgagatggattctgctatgttgcccaggctggagtgcagtggctattcacaggtgcaatcatattacactgtagccttgaactcctaggctcaaacgatcctcttgcctcagcctccagagtagctgggactataagcacatgccaccctgcctggcaataatttttggcaaatgagtacacccatatgaccaatcagtcaagatacagaacattttaatcacttcacaaagttcctgcttactcctttgctacaaatctcccaccccatcccagtcccaggccaccaggaatctgctttctctcactatataggttaattttgcctgtttgggaattttatacaaatggaaatatattatgtactcttttgtgcctggatttttttttttggctcagtatatttttgaaattcatccatgttgtgtttatcagcagttcatttatttttattgctgagtagtattccattgtatgaatacactactttatctgttcatttgttgatggacatctgggttgcttccaggtttgagctgttatgaatgaaacttatgtgaacagttatgtacaagtttttttgtgtttggggtgtgtgcaagtgcatgtgtgtttggtggacatgttttatttctcatgaataaaatacctgggagaggaattgctgggtcatgtaagaaactgccaaactcaacaattctttttaaccttataaatgtcattactatgaatgtccacaaaaggacattgtacatttcctccaaagagcaaagggttagagggagaataatttttatgagaaaaactttaaaaatttgataccttaaaaatacgttaaacttttcataacaatattttttttcctttttattttttatttatttattttttttctgagacggagtcttgctccgtcacccagactggagtgcagtggcgcgatcttggctcactgcaagctccgcctcccgggttcacgccattctcctgcctcagcctcccaagtagctgggactacaggcgcccgccaccacgcccggctaattttttgtatttttagtagagatggggtttctccgtgttagccaggatggtctcgatctcctgacctcgtgatccgcccgcctcggcctcccaaagtgctgggattacaggcatgagccaccgcgcctggcctcctttttaaaaaatatattttagggacagggtttttctttgttgcccaggctggtcttgaactcttgagttcaagctatcacagcctcacaaagtgctgggattacaggcgtgagccaccatgcccagccctcaatattttttaatagatagtatgcaaggggattagaaaagtgtaataagaaaggagttgaaaaagagagcaaactaatgcaaaataattactaaagacttcttgacaatggcaaaatcatcctacacagctgctctgagatctcagcacttgctgtcagctaccttctggcaaagctactttgtcaaatggatgcaataggatccatattgatctttgtgaaggaatatctttattaatataagcaaacacgcctctcacttatagtaatgtagaggtgtgggctttttcttttagtagtattgtttccccaacatatatcactttcctttgaaatgtgggctgagtcataaattaatgtcacaaatgagggaggcaactatgttacaaagtaggaaggcgtagatatgaattgttacagttgacagctaagtactcttgaactaaatgtcattatgtcaaattctgagatattaaacaattgttgaaatgtaaaattgtggacatttaggtttgcagcctaaaaagttttgtcaatcttttctagacattctgaaatggaaatgaacaggtggattgaaaacaaagacaaatgaggagtttaaagactttcttggcacctcatagagaagttgctctacgctggttatgttttaaacaaaacacatataaatacattcagcatttctggaaacagatttattagatctttccatttacctttgggaaaaaaatatagaggactcaaggcaattattcactatattctttctatcatgtattatttaatctcaagctaggagaggaactctgttttacatgatgccataatgtacattagtgagctcaacccacttaatcttaaaataacagtatcaggtcagggatttagaatacagtattatatgaaaacagttggcagagagactccctcttctgccattaataactggaaacgatatttcagaccctaaatccaactgaaacccagaaacaatacatggagaggatggggtggataatttgtgagaacatgtttttcaaagtagagaaagaatcactatgtttttgctgaattatatgttgccatggacatggcagtttgcagtaatgatgctatcatctatacagctgtataacaacacagcttctttctctcccactccttcagtaaggcttaaaaataataggtttgtgtgtagtttggtaagaaaattagaatcacttaaagtcatttcaattccaacccaagaaagaaaaaaagagacttggggggatggggaagaagagcaaacaaaatgtagaaaaaatacatattattggccgggcacggtggctcacgcctgtaatcccagcactttgggaggccaaggtaggcggatcatctgacatcaggagttcgagaccaacctgaccaacatggtgaaaccctgtctctactaaaaagacaaaaaaattagccgggcgtggtggcacatgcctgtaatcccagctactcaggagggtgagacaggagaatcgcttgaacccaggaggcagaggttgcagtgagccgagatcctgccattgcactacagcctgggcaacaagagcaaaactccgtctcaaaaaaaaaaaaaaaaaaaaagaaagagaaaagaaaaaatacatattatataatgaagcataatatgcattatgcagagactaaagaggggagtcttggttgcctgaaaactaatgggtaaaatccattgaagtgggtgaatccagtgaaaagacctggattgagtccttgttgcatcccttgcatgtgaccttgagcaaagtcaccatgtctttaaggctgttttctcacctataaaatggaataattggccggcgtggtgggtcacacctgtaatcccagcactttgggaggctgaggcaggcagatcacctgaggtcaggagtttgagaccagcctggccaatatggtgaaaccccgtctctactaaaaatacaaaagttagccgggggtggtggcaggcccctgtaatcccagctacttgggaggctgacgcaggagaatcacttgaacccgagaggcggaggttgcagtgagctgagatcgcgccactgcactccagcctgggtgacaagagcgagattgtctcaaaaaaaaaaaaatcataacggtaacgtcctatacctcaagggactgtggtaagaattaaaagggtgaaatcaatgtgtaaactatgaagcccaatagaaataaggtgttatacagacaattgcactattgaatctccggagacagagttgagttaaggaaaaatgcactttcggaaagctttggcgactgaacgacctgagttctccaacgccaaggctggaagtttggagaccttgaaacaagtaaattaccattaatatcataattttcagtttccttttaagaaatgagagtaacaccactttcttcacagaatcaagtgagagagaacctatgcaaaggaacttatcacttggtaggtatttgaagctccctctgcctgaaaactacttattcaaagactgcaacaaaaggtgttcacagtgtggtatctttcaaaacatacgctaaggcaaggaacagataaggaaatggaagtacatccaattgggatccaagcaacccaagtgggaaccaacagctagacttggagatgtcttagctcactcttaaccacgtgagggtagggtatccaaccaataaagacattcagagttggagagcgggcgagtggagtgtcctttagactccgcggactcgacgggagggaccctgcaatgcttaattagaaccggttgccatggcgacagtctctaggcagcgtgggctgagctctccgtaggaataaagggtgggccgccgctggaccctgcgcgcgcccgccaccaactttccctccagatccgagaggggcggcgcgctccgcccccgggccgcgcacgtcggtgctcggcggcgcgcacgcctgcgggagccctctccaggcaacctagtgctgatcgctcgtgccggtgcggccgttaaccgcccttgccggagccctaggctcaaaagcagccccttacccttcctgggcttcccccaacccctttcccggtctgccctggggcatgagcagcgatggccggctgcatccctgaggagaaaacttaccggcgcttcctggagctattcctgggcgagtttcgcggaccgtgcggcggcggcgagccggagccggaacccgaacccgaacccgaacccgaacccgaacccgagtccgagcccgagcccgaacctgaactggtagaagctgaggcggccgaggcttcggtagaggaacccggggaggaggcggccacggtagccgcgacggaggagggggaccaggagcaagacccggagcccgaggaggaggcggcggttgagggtgaggaggaggaggagggcgcggcgacggcggcggcagccccggggcactcggccgtgccgccgccgccgccccagctgccgcctttgcccccgctcccgcgaccgctgtcagagcgcatcacccgcgaggaggtggagggcgaaagcctggacctgtgcctgcagcagctctacaaatagttaagtagctgggcttggctggtggtgggcccgcggtccccaccgcgccggcctcggacgcggctccctcggcccctcaaactgctctcttttctgctcctctcccccgcacccgcgcctgccgccgctgaaagcgcccccgctgctcggacccgggcggtcggctgagagctgcccacgcccgcctcggcccccacgcctcggcccctcctacccggccttgaagccgctctcctgagccccggcgccctcccgccgggcccgggcccctcatcccctttcacctcggcccccagcttctagctccacttcacgcaacctttccctttcctgcctggaaaggtccttcctcccaggcttgagctccctcttcttcccagatcccttctttctcctggaggtttcctcccaccccagtctgtcttttcccgggctgagtgccttgttgtttggcggcagagacgcgactcctttctagactgagctgcgaggtgcctcctgcgtaactgcaacaatgatggttataccggccccgtatccagatgagagaatggagtagattttccgtcaggtgctcagtgttgaaagtgaagggctttttagatgttttcacacagggaagcctagtctcttagtttagacatttgacattccataattgagggaagtgggaaggaattgagagggaagggtaagcaaaattttgcaagcaagccttcgggtgaaagagccataattcattaaagtggaaaagtcaggctgttttgattaaattgcaattaggtgcagtattttcagtccattaagtagatgggatggggtggggagaaagcagatggcttagctacacagatgaaagtctaaaatagaaaggtcaaggctttgcctttcatcccagttctggtttttataggcctgaaatagaaacggtttacaattgcgtttctcaatggaattgttccgaaataatgacagaggagaatactagtaagtctctgaaaacattggtaaacctgggaagtcttttgccattcagctgatagttgtaatgaaaggtgttactctggccacccaaaaagtttactactgcaagattcgctgtaattaagttcaaactcacttttgggattttctcaaaagcctaaagaaaagaagggcctggaaagtaaacctgttttgtcttcatccaagctaatagacacctgatcagatcattctcctgttaaagcagcagtttatcaataggggaaaatcatttaacaaatcttccatagaagtggactgtgttggtatttcataatataagctatctaaaatttaattttaaaatactgttcaattacagtattaccgtcaattagcaaggtaatgatgctttttgagaaacgtaaaatataaaatggcgtgtaataccaccacccagagataaacagtattaacattttagagtatatctggtctttgtgaactatcatagacaagggcttctgagatgtaattttttacagtatttaaagataaagctccctgcttaaaataaaatggaaatgtttattaagggaatttatcttagcagcagactggctctatcttgacagttaattcttacctttacaaatgcagtttgcagaattaaaccaattcaaactttagaaagtgtccaaataaggtcattattttagtacaaccctgaacatttgccatgtaagaaggttttttttttttaacttatttaaagatgatggcaagaagatgtgtgttttttcatatagaagcggccaggagcggtagctcactcccgtaatcccagctctttgggaggccggggtggcagatcatgaggtcaggagttcgagaccagcctgaccaacgtggtgaaactgcgtctctactaaaaatacaaaaattagctgggcgtggtgtcgcgcgcctgtaatcccagatactcaggaggctgaggcaggagaatcgcttgaacccgagaggcagaggttgcagtgagctgagattgtgccagtgcactccagcctgggtgacagagcaagactccgtctcaaaaaaaaaaaaaaagattaattttgatataggtataaactagaaaaaactgaaatgataaaatggccatctagttgagaacagaagtttggatttgaaataaaactagcaaaattaaagttggaaaatatttccgcttaaatcagagatttcatcatttatattgtgttttgtacagaagttgttaatgtatttttattcagatataaaatggctggcttgttcatgtaaagtatctttaaggtccttaacaggtttaaaaacagtttttgccgggcacagtggctcatgcctgtaatcctagcagtttgggaggctgaggtgggcggaacacctgtttgagaccatcttgtccaacatggcaaaaccccgtctctactaaaaacacaataattagccgggcatggtggtgcatgcctgtaatcccagctactcaaaaggctgagccacaagaatcgcttgaacccaggaggcggaggttgcagtgagccaagatcctactgctgtccattccagcctgggtgacagaacaagaccttgtccgcccaccttccactcccccaccaaaataaaacaaaaaataaaaacacacttagctgggcatggtggtgtgaacctgtagtcccagctacttgggaggctgaagtgggaggctttcctgagcacaggaggccgaggctgcagtgagccactgtactccagcctgagtgacagtgagacgttgtctcaaaaaaaaaagttacctacgttttactcctttctctaagtttaaatcccccaagagattaaaataatttcaatgacaatctgagaatttctgaggttaaggagaggctgccctttgaaaaggtggaggtgagagattttataactgagataatttgtaaataagggtataactgatcttacaggagatgtgaatataaggctatctgtgtagtttatatgggtcaatattttgtatttaatttctctatacactactagagataacatatatttgttttaatccagaagaagcaaatattctgaagtcttttttctttccattttttaccagtagactattaaacgaagataaagtcattattagagctatattgtcatcatattttcagaacagttgtttcctcagttattcatttagtctgggttggacttcccaagggggaaaccaatatcccaagagtctggcacagttaagtagttccagatggcttgcagtaataatgagggtggacactttaaaaatggcttggaaaagaaaatcgctggttatagacactaataattcagttacattgaattgtgtgaatcattaatgactttggattaggtcagaaaatcattaaactttatctaatttacaaatatataaatggaaaaatatatggattcatgttatataataccaatttttaagttgcacatttttttctcattcaaaaataataaacgttcacatttattaaataaagaagtggagaacattcacataagcaaaaagaggaaaaataccattcattgttaatcatgctttccaggtttttctcctgcttctcaggctatcccacttcttctctgtgagcttttaatattctgcctacccctttaatattggtgttctgtccttgaccttcttttgtctggttgacttatttgtccctagtcaatatcaatctgtcacatgacttcagttattgtagttatgctaaaggctcccaactctatctccatcctttctttgactgctagaacagctttacctagatgtcaaaatttcctcagattaaactgtctaaaacagaattcagtcctccaaccctctttacggcccccaaaacaaacaaaaccaaaacctgatactctttctggtgggtccatccctgacttctcctttccctgacttctcctttcacctctcacattcagtcacatcttgttaattctacctcgtaaatacctcttaaatatgtctttcttcattcccactgtcattgtcatctcttgccagtcttacccttctgcaatatattttccccagtgtagccaaaatgtttaattgtcacactgcttaaacatttttaccctttacccagagttagccaaactctaaggttaagggcacagtcttctactctgccaagtctgctcaagacttctgatcctattgtaaggggttagggtgcaactacaaatttcaaatgaagatgctatgcaaaacctcacttctaacatcaactgcaagtttgggggtttccccaaaccaccctcagattcagtaatgcactagaaaaactcatagaactcactgaaagctattatacttagagatacagttcattacaaagacaagctacaaattagtcaaaggaagagagatgcctagggtatagtctaagagggttgcagatatgaaacttccattgttctcagggaatataccttccataccctcccagcatgaatgtgtggatgtatggaaatacacacaaggtattgcccacccaagaagttcacctaaactttagtgtgtctggagtttgtgttttgttttttaaagagatggggtctcactatattgcctacgctggattcaaactcctggctcaaatgatcttcttacctcagcagagttttcattgagatttattgattgtttgcatggttgaactcagtttccagtctcccctctccagaggttaggctgatactatgtggttcaagggacccatcatgaatagtaagaatactcatattactccagaaattccaggggcttagaggttacctcccaggagctgggggcaacatctggacctctctttggacaagttttttactccacatccttcatcacctatctctcttttgccctctagataaaatccaaaggtaagggcttataatcttacttcattagttttatttctggaatcactatccacccacttcatcccagctctacccctccagaaactacacttcagctatattaaactaatgtatttctttgaaggtattgtgttatcttttgcctctgcacctttgcacatagtatatttttccctctgcttggaatactatgttcccccaatagccactcccaacacaatccaatttcttacccgttttttagttctctgtttaacacctcttccttgaggaagcctttgcttaccgtcctcacactcatcatgagttaggggtcccttctacgttcctttccataatacccaatgccattcctcttgtaagtacttggtttaatttattattttttgtcagcaaatatttatatctccgtcactagaccagaggtctccaaagtcaattgcacctaaaatacttcatttcggcaaaggaagaaaacattatcatctgtttatttgtgtataacatacgaaattaagtgctataaatatttgacatgtttattgagattggcaacttgttctgtatgacgactgatttcatgtgaagcatggtaagtgtggtattctgagggagtgcaaattccacagcttatgggggttgaccgtggcatcctttctccaatttttaggccattacaaactattacagtttatctgtgcctgagtaaatagatttatggattatatttcctggttttaacaaaattagccctcatgaaatggaaaattggctttaaaagttcctgtgaagatggctgggcttggtggctcattcctgtaatcccaacactttgggaggctgaggcaggcagattgcttgagtcttggagttcgagaccagactgggcaacatggcaaggccccgtctctacaaaacttagttcagctactcaggaggctgagatgggaggactgcttgagcccaggaggttgaggttgcagtgaaccatgatcatgtcactgcactccagcctgggtaacagagtgagaccttgtttcaaaaaaaaaaagtttctatgacaaaatcatgagttaaacataatattgataatgcaagtgtaagaaacataaaagttaagagcttatagttctctcacgcttactacatatgaatttgtatggtcaacatatgtgtttaaaaaatttgttttgggccgggcgcggtggctcacgcctgtaatcccagcactttgggaggccgaggcgggcggatcacgaggtcaggagatcgagaccatcccggctaaaacggtgaaacctcgtctctactaaaaatacaaaaaaattagccgggcatagtggcgggcgcctgtagtcccagctacttgggaggctgaggcaggagaatggcgtgaacccgggaggcggagcttgcagtgagccgagatcccgccactgcactccagcctgggcgacagagcgagactccgtctcaaaaaaaaaaaaaaaaaaatttgttttggtaactagctattttgaggttaaacttaaaacaaaattcatgttgatccatgtagatctagttctttcattgtagctactgtatatcattctatagtatgattatactatgatttatccaatctcctattgatggacatgtcagttgtttttaatttttacacatatattaagttaatactgactgctctaatggatacatccccaaatctcaaaggcttaacataatgttagtttatttcttgcttatatagagttccttcagtggagaaggaggagctgtgttctgtgaagtcattaaggaacccaggctgatggagactctgtcctttttaacctgtggtttccaacgttgctctaggcatcaacatttatccagcaaatataagggagtagagaatggtgtttgaggtttttaagggccagtccttagaagtggcatatatcacttctgttcattttccattggctagaattcaagtcatatgacaccacctgggacctacatttcctaaaaaagggggctgggaaataaattgctggcttggcagttaattccaagaaacaactctacactatggacaaagagtacaaaatcttggtgggtagcttggtggctcctgccctacagataatgctagtttggacatgtctccttgtgcatatgttcctaggtttcttgggtatgtttctagaagtggaaatgtcagattgatataagtacattttaaatttattaggtattgccaaattgttttgtccagcagtactgtatgaggagtctgatttctctacgttcttgctaccatttgaactgccataccgtgaagcttgtattttaacacagttgtgttccattattgctactgaaccatgtaggaaagaatgcttatagctgaatatgatcttgatttagggcattttagaagagggcattatgattccataatgatttataagatcactaaagaaacattaccattgttgtcttttatggatgcctaaaagtctaaactgcctaaagtccaataggaatataatatgagccacatatagtttaaaattttctattaaccacctttttaaaattaaaaagaaacaggtgaatttagttaaaaaaacttattttaactcaatatatccaaaatattactatttcaacatgtaatccatattaagatattattaataaaatattttatatttttataccaagtttttaaaatcctgtgtgtactttacacttacagtacatcccaatttggagtatcacatttcaaatacttaataattatatggggctaatggctaccataacaaacaattttgttttagatttgctattttttaaaaaaaccacaactacaacaacaaaaactttaattctgtaacacatatctaaccatttttaattaatatttaaaattaatgaggaaatataacatttcatattaaattagagactggcatttcatattgacattagagccacttagctgggtgcagtgcctcacccttgtagtaccagcactttgggagccagcctgttgcccaagctggagtgcagtggcgtgaacacacctcactgcagcctcaaacttctgggctcaaggggtcatcctgcctcagcctctcaagtagttggcagtacaggcatgtgccgtcatgcctggctagtttcttctcttttggtttgttttttttgtttttgaaacagagtctcgctctgtcacccgggctggagtgtagtggctcaatcatggctcattgcatccttgacttcccaagctcccaagtagctgggactacaagcacatgccaccatgctcggctaatttttatattttttgtagagatgaggtttcgccatgttagccaggctggtttcaaactcctggcctcaagtaatccatccacctcagcctcccaaagtgctggaattgcaggtgtgagccaccatgcccagcctactagttgttttctttccaggtttgtataggcctattatcatcatcatctttctctttattattattttccttttctgctctcccatgaaaggtagaggataagggaagaaaaagaagaaagtattccattcccacatccctttaggttggcttcttattttatgtttttgttggtgtgtttattttgctttgttaacattttcaactagctatagaaacgtttgcaattcttattactgattagcattccaaaactttgtaatgaacatttttctttctttctttttttttttttttttgagacagggtctcgctctgtcaccaagctggagtgcagtgacacgatctcggctcactgcaacttccaacttcctggttcaagtgattcttttgcctcagcctcccgagtagctgggattacaggcacgcatcaccatgcccagctaatttttgtgtttttagtagagacgtagtttcaccatgttggccaggatggtcttgaaatcctgatcttgtgatcctccagccttggcctcccaaagtgctgggattacaggcgtgagtcaccatgcctggccatttttcatggatttaaaacagtatcctcatgtgaattatttgagaatattgtgaacaatgacaagtttgaagtataatactatatgaagagtaatgaactgtttaaaagattgagagtattcttaattcttcatgtatattttcactgaatactctggtgtatagctctgagaaagactagttcattactacctagcgtagtttaagaaagaaaaagaaccaaaagaataatctcctggttagaagtatgaaagataatttttttcctggtgacttgattccataatgatttataagatcactatagaaacattaccattgttgtcttttatggattaaagtatttgacctgctttttaccacaaagcacaacctctggtctttaatatttttgtagtttctttttttttttttttttttccaagatggtgtctcgttctgttgcccaggctggagtgcagtggcccagtctcggcgcactgcaacctccgcctcccaagttcaagcgattctcctgccttagcctcccaagtagctgggattataggtgtgcactaccacacctggctaatttttgtattttattagaggcagagtttcaccatgttggccaggctggtctggaactcctgacctcaggtcatccaccctacttggcctcccaaagtgctgggattacaggtgtgagccactgcacctggcttatttttgtaatttctgtttttttttttttttttttttttgagatggagtctcgctctgctgcccaggctggagtgcagtggcacgatctcggctcactgcaacctccgcctcccaggttcaagcgattctcctgactcagcctcctgagtagcttggattacaggtgcgggccaccacacctggctaatttttgcatttttagtagagacagggtttcatcatgttggtcaggctggtctcgaactcccgacctcatgttctgtccgcctcagcctcccaaagtgctgggattacaggtgtgagctactgcacccagcctgtaatttcttagtcacatttttctatgttgtgaatctaaatacaaaaactaagatactagtaagcctgtttttttgagaagtatattgtactatatgtgtgtgtatacacacacacacacacacacacacacagtaaaaaatactaaaaggctaaaatgctaaagggcaagaattaggttgtaaacatgttctttatgcaatctaatatgttattacataaatatgagatgacaatcattaaattcagctatcactgattttgcaaaaggaatgatctcttaagttctgagatttgatttctggcaactctgaatatttattagttcaaagtggttcaaggcagcttataaatagttttatttattacttggaaagatattggtcctattattcacaatatacttatatataatcagagaaacaaaaatattttcagctttttcggggtcacatggaaagttaactataatctagaaacaattttcagtgtttcaaaacaaaaacagttttgtgtctaataaaaaccctttgcccaggatattctctcatcttggattgataagtatctttctgtaagagttaacagtgtaaacttgcagagggtcagcattgtctacacccaaaataacaattgtacaagtatgaatagtagacacctgttcctgtttctcttgctgctgtgtactatattcagtgagacctcgtttaggcattgttttatatttattacctcttttaatcatcataaaaatatatgataaagatttttatcattaacctgttttgcagatgaaaaagctgaggcacacagaatttaaagaacaagttttcaccatcagcagtgtcaccaggacattaacctaggcagtcagacttgagagattataattatgatgttcattttatgattctcatgctacattacaaacatttcctacggggaaaaatttcaatgcaaatgtagaaattgaattttgattactgccatttgcttagctcaggcttttatcacttcttgccttgattaccttagtagcctcccaacaaatttccctgacactggtcttttttccttttaatctagcttcactggattttccagcattattgaacttactatggttctcttttaaaattatttatttatttatttatttggagatggagtttcgctcttgttgctcaggctggagtgcaatggcacgatctcagctcaccgcaacctccgcctcctgggttcaagtgattctcctgccttaggctcccgagtagctgggattacaggcatgcaccaccacgctgggctaattttgtatttttagtagagatggggtttctccatgtcggtcagactggtctcgaactcccgacctcaggtgatccgcccacctcggcctcccaaagtgctgggattacaggtgtgagccaccacgcccagcctaaaatttatacttatttatttatttagagacagagtctcactctgttacccaggctggagtgcagtggtgcgatcttggctcactgcagcctccacctcctaggttcaaaggattctcctgcctcatcctcccaagtagctgggattacaggtgcctgccaccttgcccagctaattttttgtattttgagtagagatggggtttcaccatgttggccaggctggtctcaaactcctggcctcaagtgatctgcccgcctcagcctctgaaagtgctaggactacaggcatgagccactgtgccctgctattttttaaaatagagatggcggtctctattttgcccagggtggtctcaaattcctaggctcaagtgatccacccaccttggcctcccaaagtgctaggattgtaggtatgagctaccttgcctggcccttaccctgattctctaaagatacgttatttcctgtctttctgcctttgtagatgctgtttcttctccaaagagcatccgcttccctgactaactagaataaaccttcctttggaggcggatagggtggttggatttttattttatcttccacccaaaaaagtatcttgttcaggcattacctatagataagagccgtctaagggttttgcaccaaatatttctctaaactcttgcctctaatgaaagaaaagaaaaagttaacaattattgctgtttatttttatttttattttattttattttttgagacagagtttcactcttgttgcccaggctggagtgcaatggcacggtgttggctcaccacaacctctgcctcccgggttaaagtgattctcctgtctcagcctcccaagtagctgggattacaggcatatgccactatgtctggctaattttgtatttttaatagagacagggtttctccatgttggtcaggctggtcttggactcccgacctcaggtgttccacctgcctcagcttcccaaatggctgggattacaggtgtgagccaatgcgcctggcctattgctgtttattaaaaacataatttagaatccagaaattctttaaacaatagactgaaaaaaatagttcacagcttggtatatggcttataacaatggcaaaaattaaaaaaaaatgcattatttttcacttactaagatgcctggagatatttttttccatttagtacttgactaatcttgcaatctgtttaaatttttcaatttcattactaattatttaaatagctgaaggtacctattttctatataattttaattcctaatgcagccatcatctactcaacaaatgtctcctttggaaagaaatcctgttttttttggttctttaagtaaaaagagagactgggctcagtggctcccgcctataattccagcactttgggaggtcaaggtgggtggatggcttgagctcccaagtttgagaccaacctgggcaacatgacaaaaccctgtctctaccaaaaaaatacaaaaattagctgggcatggcggtgtgtacctgtagtcccagctactcgggaggctgaggtgggaggatgatctgaacctgggaggctgccctgagcccgggaggcggaggttgcagtgaatcaagatcgcaccactgcactccagcctgagtgatagagccagaccttgtctcaaaaagtatatataaaaatgaaaagagaaatatttttgtttagtttgcaatctgtattaatgtcatatattaagtatctgatcttttagaagccagtaaaacacatatgggtcatataagcagtggattggccaggtgtggtggctcatgcctgtaatcccagcacttcgggaggctgaggcaggcagatcacttgaggtcaggagttcgagaccagcctgaccaacatggcaaaaccccgtctctactaaaaatacaaaaattagatgggcatggtggtgcacacttgtagtcccagctattcaggaggttgaggcaggagaattgcttgagcccaggaggtggaggttatagtgaactgagattgtgccactgcattccagcctgggtgacagagcaaaactctatctaaaaaaaacaacaacaacaagaaaaaaccagtggattataaattgacataaaacattatcacttgtattctaaaagagtcatggattataaccctcaccattgtatccatatactgtaacatagttttggaatcatcattgcaaaatcgttattcctttgcataatgagtttaaaaatggctcaaagtaaagcttgtctttcagaagcagaattccattttatatattaaaatacccagtttatgtttaagtataatattaaggtaaaactatccttgactatcaaggaaaagaggtgatattagctttagtgcaggtctgtaaaaaatacattgaagattaaaatataattgagctgggcatgctggcatactcctttagttccagctactccagaggaggagcaagaggatcacttgaacccaggagatcaaggctgtagtacactatgattgcaccctgtgaagagccactgcactccagcccgggcaacatagtgagaccccatttttaaattaaacaagtaaaatatattgattatcaaatataaaataaaagcgttctctcagattgagaccttacaaatgaatagcaaaaattagtgcctcaatgttgttcaaaccagctaattaaacatcacaatggaaaaatctgttaagtattacattaagtaattaggatatttttatgttcttatataggttgaaattatcaaaccatgaaactgaattttttctcccttccccaaagactataaaagattttaattaattaagctttctgtattgagaattcccttggttttaagaagctttctattttactgtaacttttcttttttttttttttttaggcggagtctcactttgtcgccaggctggagtgcagtggcacaatctcggcacgctgcagcctccgcctcctgggttcaagtgattcttctgcctcagccttccaagtagctgggactacaggcgcatgccaccacgcccaactaatttttgtatttttagtagagatggggtttcaccatgttggccaggatagtctttatctcttgaccttgtgatctgcccaccttggcctcccaaagtgctgggattacaggcgtgagccaccacacccagctattttactgtaacttttctaagtggtcgacaaataaagatagtcttatgtgtggcttggtaatttttgtggttaatatataatatgaaaaaattataggttccatgcatatatgatcagccatgtcaaagcaagtattgagttgtttggcatttcatagtatgtatagttaaaagtagattctaaaaaaaaaaatgattaaggccgggcatggtggctcccagcactttgggaggccgaggcgggtggatcacaaggtcaagagatcgagaccagcctggccaacatggtgaaaccccgtctctactaaaaatacaaaaattagccagatgtggtgacgggcgcctgttgtcccagctactcaggaggctgaggcaggagaatcgcttgaacctgggaggtggagttgcagtgagcccagttcgcgccactgcactccagcctggcaacagagtgagactccatctcaaaaaaaaaagaaaaagaagaagataaaaaagaaagaaaaggaaaatatatgattaaagacagtattctttaaaaaaaaaatgacatcaatgagtttattttcttattcatttgttttccacctcattacagaatggatttcaagtggcaaattaattttttataatggaagtaatatttattcatcaaaaattaagtacttaccatatgccaaacactgtgctaaatgctacttattcagagataaacgtgttcctttcctcaagaagtgtgcagtttagaggaaaagtcaggcaagttaaccagcaagtacaatacaatgtgaacatgttattataactctactatgtgtgaagtgatatactgagcaccttacatactgttattctctatttttcagataaggaaattaattcttagagacattaggtaacttgtccaaggtcacacagtaagtgttagaatcagaatttgaactcaggtgtgtctgactccaaagcttgttatcttgctgcctctgtacagtatactgattagagttaagatatagatgcaggctgggcgcggtggctcacgcctgtaatctcagcactttgggaggccaaggcaggggatcacaaggtcaagagatcaagaccatcctggccaatatggtgaaaccccgtctctactaaaaatacaaaaattagccaggtgtggtggcgtgcgcctgtagccccagctactcaggaggctgaggcaggagaattgcttgaacttgggaggcagaggttgcagtgagccaagatcgtgctactgcactccagcctggtgacagagcaagactccatctaaaaaaaaaaaaaagatatagcaatgcagaggattttatggggacactgagacacatttgccaaagtagtcccttggattttggaaggggacacttaaattaggtttagaagactcaataagaattagccaagaggaagagggagctgaaaagcattccaccagagacattaccatgtgcaaaggcatggagatgagaaagcatagcacatttggtacttgtctggctaacttttatttctcttaataaaggagggtaaacctgcaaggaaaaccagagaatgacctgaaagtcattcattcatatattcagttactactgggcactgtagactctgtatttgctgtatttctagggagatactggaatttttaaactaaaagtcacagacatgtcacatatgttaaacaacataccaaataatcaggaaatagaagagtcttaaaatcttccgccctgtagtttgttttatttggctattagaacagtgtcttctaaattgtaaaatatctttctctctcttttttttttttcctctgatcgtttctctcatcattctacctgatgccaagctgtgtggggattttagaacttgaagactgcctaaactgttcccatttcaactatgcttaaatcctatttacttcctaaagatttgtaaaaggataagtatgtttctctttatcagtattcactgtgtgactttatcttttagaggataaatgtactaaaagtactaaaacagatcctttcaaggacatgtctggagagatagaagcatactgagttgctgagtagtatacaagacaacacaagaccatgacctataaatcaacatgtaaaacttaggaggtagagaataacttttccgtgtttgaaggggtttgaaggggtgatcttcatggatacatttatcattcagtgagataattttttattagtttaatttttccatccttacagtctaaagagacaggcttcaacactcgtttcaaatgctgtatcttactagaagaatttccctgaggtcaggtggaagtatcattccctcccatgaactaccccagtattgtaccaaaagacatttggtaattccttcctttgtattataagtcatttatatgcatttcttatctcttttattaaattgtaccttccttgaagcagaattcatgtttgatccacagcactaagccttgtacatatgaggcactgagttaatatttaatgaattaaaacatagcacatatattataaactaaattattaggcagtgtttcttaagtgttgaacgtgaattacctacatcaaaattatctcgagtgttttgttaaaatgcaaattcctgtgctcctgcccgcgcctactgaatgagaatttctatgggttccgggaatctgttttgaataaaaattgtaggtaattggctgggtgcggtggctcatgcctctaatcccagcactttgggaggctgagacaggcggatcagttgaggtcaggagttccagaccagtctggccaacatggtgaaaccctgtctctactaaaaatacaaaaattagctgggtgtggtgacacacgcctgtaatcccagctactcaggaggctgaggcaggagaatcacttgaaccagggaggcagatgttgtagtgagctgagatcgcgccattgcactccagcctgggtgacaagagggaaactctgtcccccccccccaaaaaaaacattataggtaattatggtgcatactaaagtctgagaaccactgcattagggagaatgtaagaatccaaattaaagttacatttatttgaaaggacagatgtatatcttggtaaaaattataaacattagtacatggtggagtataaaatataagaaagtgaataaatagatattttcagtgcaaatttttctttatcacaggaccagtgttcaatattttggaaagttcaatctaaaaaagcatatttaggtataaataattttaaatattggccattttctgtgaatgcatgtgaaataaagcaccatggttttataattaaagactaagaaaagacatattggacatcatatctgcacatccttatattgctagatgcaaagattgccttttagggcatgcttctttataaaatagtttgtaactaatagtactgtcagaaatactgtagtttagataatatttaacatattttgctccttatttttctgtaacaacacattatattgttatgtttatttgtagattttcttatttgtgtatgttttatctgtgattttttaaaaatgtgaaattgttgttagaataccatttatcttggcttatgcattattgaattgataaggactaagataagctatagcaagcaagtaatataaatcttcatctgggtagttcttttttttttttggagactgagtcttcctctgtctccaggctggagtgcagtggcgtgatctcggctcactgcaacctctgcctcctgggttcaagcgattctcctgcctcagcctcctgagtagctgggactacaggcacacgccaccaggcccagctaatttttgtagttttagtagagatgaggtttcaccttgttggccgggatgcttgtgatctcttgatcacgtgatccagctgcctcggcctcccaaagtgctggaattacaggtgtgataaaatagttttataaacctaagctgtatttataatggtaatacaaataagaaatgtttaaaataatgcttgtaatgtagaacactggtccaagtattttacatacattaattcatttaatcctcatgacaactaaataagatagacactgttattatccttatattccaagtaaggaaactgaggtataggttaagcgatctaagtttacacaactgataagtagctaggatatgagccagtataatctagcttcagagtcagcattctcaaccgctctataataatgttattattgtatttttaattagcaatttgtttgattttgtcataatcattatcagatcttccagcagttacatggcagatattttcaagtaaatattttaaacaaattcagcctatatctaaacaatatcttttaaaaattatttttaatgctattcttacttttactgattatatgtagtaatattgagatttcttaagaatagttggggccgggcgcagtggctcacgcctgtaatcctagcactttgggaggccgaggcgggtggatcatgaggtcaggagatcgagaccatcctggctaacaaggtgaaaccccgtctctactaaaaatacaaaaaattagccgggcgcggtggcgggcgcctgtagtcccagctactcgggaggctgaggcaggagaatggcgtgaacccgggaagcagagcttgcagtgagccgagattgcgccactgcagtccgcagtccggcctgggcgacagagcgagactccgtctcaaaaaaaaaaaaaaaaaaaaaaaaaaaaagaatagttggatttcagaggattgttttaacctcccatttttggtgtttgtgatggtggtagatggtcatttaacttaaaaataaataaataaataaaaaataaaggccagacatggtggctcacgcactttgggaggccaaggctgtgaggattgcttgagcccaggagtttgagaccagcctgggcaacatagtgaaaccctgtctctacaaaaaccttttaaaaattagccagacatgctggtgcgcctctgtagtcccagctacttaggaggctgagataggaggatcccttgagcccaggagtttgtggttgcagtgagccatgatcgcaccactgcactccagcctggatgacagaggagaccctgtctccaaaaaaaagcagggagagccttgattgacccaaatgaaaatctagtaattttaattttcagaagctgttagaacacataatggattcttacgacaaaatctagataaatttgcataccaattttgaaaaattatatataaaatatgtttagtaatgtacatttctttctgctaaaaagcactagtttttctctacaaaaatgcatttttaaattaatgtctctctggtacacaggaataaaatatttgtccttgatctgtgtcatttcctcattttaaattcaccaaatagtttattttaggtgtcatttattgctttattttaataaatactgaaaatgattaaccacattgtagaaatacccaacttatgaactcatgaatattgggctatgttttaatatgtaaattatgtttaaaaattaatctgtttcttcaaaacattaacttgcctaagtggtttaattgaataccatcagactctgttataatcaggacagctcagaagaagagaactaaattagagagaaacccagaatggaaaataagggagagtttaatgcttagaataaagagttagaaaagaggaggtgggctataggaatctttaataagaagattatagggctgggtgcagtggctcatgactgtaatcccaacactttggaggatgaagcaggaagattgcttgaaccctggagtttgagaccagcctgggcaacatagcaagtccccggctttacaaaaaaaattagccaggcatggtagtgcctgcctgtactcctagctacatggcaggctgaggaaggaggatcccttaagctctgaacttggaggctgcagtgaaccattcaaccaccattgaaccccagcttgggtgacagagtgagaccttgtccccccacctcaaaaaaatcatagatatgcccaaacattttgctcttaatagcataattaagatatttttattttcaatgcaaatttgtaatcttaaattgaaaaactttatgaacattgaattatccgtggaactcaaaggaaaaaggatcactgtaattttatattttacaggagaaaagatttcttgaacttttttgctttgatctatattttgtcatttcattgagagtagaaaaagaatgcatcactttttataaacaaaatatttttcttttctaaatatgacaccagtatgaaacttacccaaggtgtttaagtgtttaaaatgtaaactgaagatttgattgttattaaagtatcattttacctgttggctgagaggattcagcatagtgcgagggagtgggaacaagtacctataagtatacatagggcaattaataactgttgaaagaatgataatatcctgtttctcaaataaacagaattttaccttactacacaaagaatttaattcaatttagtctatggagtttcctactagaatataagctccagactttcttttgctcaccatcctatcctcagtacctaggatactgaatgcttaggacatagaaggttttcagaaagtacttaatgaataaaatatatgcttaacacattttttattgtggcaaaatatacatcacttattggtttgatattgttgttgttgttttgaaccaagattttgctccatcgcccaggctggagtacggtggcatgatcatggctcactgcagcctcggcctctgggtctcaatcggtcttcccatctcagcctcctgagtagctagctgggactacaggtgtgtgccagtacacacagctattttttttttatttttctgagatggagtcttgctctgttgcccaggctggagtgcagtggcctgatctcggctccctgcaaactccgcctggcaggttcaaacaattatcctgcctcagcctcctaagcagctggaattacaggcgtgtgccaccaaccctggctaatctttgtatttttagtagagacggggtttcaccatgttggccaggctggtcttgaactcctgacctcaggtgatccacctgccttggcctcccaaagtgttgggattacagacatcagccactgtggctggccatcttttttttttttttttttttttgagacggagtcttgctttgtttcccagcctggagagtgcagtgtcatgatcttggctcactgcaacttctgcctgtcgggttcaagcagttctcgtgcctcagcctcccaaatagctgggactacaggcatgtgccaccatgcctcactaatttttatattctttgtagagatggggtttcaccacgttgcccaggctggtctcaaactcctgggctcaagcaatctgcccgcctcagcttcccagagctgaaattacaactctgattctcaggctgagattacaggcctgagccacagctcctggccctaatttatgttttacatagcgttttgttctgattagatacaagccatatgctcattataggaatttttgaaactatggggaaaaagaacaaaacttacttgtattttgccactccaaagagccatcctttaggaatagttttctctatttctttttttctattcaaatataactaaattgagatgatacatacatatatatatatatatatatatatatatatatatatatatatatgtagtattgtgccctgcttttttccttcaacactttcaagtgagcactttttaaaatcattaaacgttccttgaaaacataatgttgaaatgttagtgtgattttgctcaaaattcacagtaggagatatattttattttgtgattaaggccacatgtacatatttaattgtatcaaaaaattgtaaaacagtattaagggtaatgaattctgatttttttttttttttttgagtcggagttttgctcttgttgcccaagctggagtgcaatggtgcgatcttggctcactgcaacctccgcttcctgggttcaagcaattctcctgctcctcccgagtagctgggattataggcatgcaccaccacacccagctagttttttgtatttttagtagaaacggggtttcaccatgtttgccagtctggtctcgaacttccgacctcaggtgatctgcccgcctcagcctcccaaagtgctgggattatagacgtgagccaccatgcccagcctgcattctgatattatctgttgtattttattctttaaaatatgcttgttccatccctttgaagtgattttgtatttcactaatggattgcagcctgaagttggaaaaatgtctcttgtatgaatattctgtaattcaattatgacccttttattggacaaatttggttcagatttttgccagtagatgtatttaaaagtgtatgtgactgtatttacaaaagtaattaaggctgactgtaataaattattcccaaagtgctaaaatgtaagtcttccttatcagtttgttgtatattttttcagatttttgtatgcattcattcactctctatgtcaatatctatctttacacacttttttttcctaaacataatgtgattattctactacaactttaaattttttaaaagtgtatcatggctgtcttttcagatcaacatgtaaagatttacctcattcttttgtctgctgcatagtgctccgttacaggtggatcataatttaactttcccattattaatgaagattgtgatgcttccaattttttgtgttacaaagaatgctgcagtggccattcatatatgtagatctttttgcatacctgcgtatattttagtagaatagattttcctggaattgaggttgttgaaatatagggtatgcatgcttaaaatcttttcttaaattcttcaacttatccttcagaacatttatatcatttacctccaactccaatagtatatataagaaaaaggctggatgccatggctcacgcctgtaatcccagcactttgggagaccaaggcaggtagattgcttgagcccaggagttcgagaccagcctgggcaacatggtgaaaccctgtctccacaaaaattagccaggcatggtggcacacacctgtggtcctagctactcaggaggctgaggtgggaggatcacctgaggctggggaggtcgagcagtagatactttcaattttaatttttgccaatctgatgagcaagaaagatacatttgatttgaatgtattggcttggcatcttttcacatgcttattggtgttttatatttcttctgtgatttgcttgtttatatctttaatgaacttttgtatttttattatagatttgtgggaaatctttatgtattatggatattagccacttgagtatcatgtgttacaaatggcttctcccagtctataagatgtcttaaaactttacaagagaatctttttctatatagaagttaaaatttttgtacttggtcacattggctaatttttttctttatggcttctgggatttgtattatgtttaaagggtctaactgaccttgcctacctactgtcttctatgttcctctagatatttatagctttttatgttcattgggaatttttgtattggataccaccacgtataaatagttcaaattgatatatctaattattacttctgataagtaaataattcttttaattagaaagattgaaaagtttgtgaaaggagttttaattttgtcaaaatgcttaaattgaaacctggaagtctataatggtaaatatagttggctaaggcatgaatataagatttataaaagattggtataatggtagatactttttggataggaaaatatttaaataaaagtgcagatgtctttttttttttttttttttgaaacggagtctttctctgttgcccaggctggagtgcagtgtcacgatctcagctcactgcaacctccacctcctgggttcaagtgattctcctgccccagcctcctgagtagctgggattacaggcatctgccaccacaccaggctaatttttgtatttctagtagagacggggttttgccacattggccaagctggtctccaactcctgacctcagatgatccacccgcctcagcctcccaaagttctaggattatagttgtcagccaccgtgcctggcccaaaagtgcagatttctaagcagtcttcatggccaaccaaattcatttgaatttaactatgggtgtttcacaaattcttgccttgctgacattttcgtcttagattgtaagggaaaaaatatatttgtatgagaagtcttgagggatatacaccaaattattaacaatgatttttttggggccaggcacggtggctgatgcctataatcccagcactttcggaggctgaggcaggcggatcacctgaggtcagagttccataccagcgaaaccccgtccctactgaaaatacaacattagctgggcatggtggtgcatacctgtaatcccaggtactcgggaggctgaggcaggagaatcacttgaacacagtaggtagaggttgcagtgagccaagatcacgcctgtgcactccagcctgggcaacagagcaagactccgtctcaaaagaaaaaaaaaataaaataaaatgcagtgattttttcttgggatggtaagatttcagatttttgtaaacttttttacttattatgttttaagttttttttccaacaaaaaatgttatttgtttagtaaatatagaacagataaaggattaaatgaagggtactgttgctctgcatctatttatagccaatgaggaagaattgcttggtgggtaggaatgatagaaacctctggagacaaagtgaccagattattaaagtttgtgatagctaggatggagaattctagaaggagccacatacacatattgtctacatggtaggaagaaggctttaaaaaaattgaacaaaaaataagtaatcatgaccttatgagctaagacttggaaaattgggaaacattaaaacataattatataattatacagttataaattataacaatgagtgttttttaaaaggcaagtgcaactaaaactactgtgacttcacttgcaacaatcttaactcaggtttttgttttttttttttttgagatggagtcttggtgtgtcacccaggatggagtgcagtggtgtgatcttggctcactgcaaagtctgcctcccaggttcaagtgattttcctgcctcagcctcccaagtagctgggattacaggtgcgtgccaccacgcctggctaattttttttttttttgtattttttaatagagacggggtttcaccaagttgatcaggctggtcttgaacacctgacctcaggtgatctgtccacctcggcctcccaaagtgctgggattacaggcatgaaccaccgtacctggccttaactcaggttttataaaggatatttataaaagatgaatatagaaaagtgacaaacataagtgtggcagaataattaaaattaagaattaacagatgtgaggaatatattaaagataattttaaagattttagaattatattcagaaacaggaatatggaaaatgtatgcttttttaatactaacagctcctattttgtttccatattttccatcaaggagaataatatttattctgtaagaacaacaacaaatcacttagtaaagtagaattaaagtccaatataggtgaaattaagaaagtatcttaactactcaatatgactttgttttctaacctgaactaattatatctgagattgctatgaacttgtaggtaagaaagttcaactttgaggaattattgagaatagaaaaatgccagaggattggaggtaagcaatgagtaaggactttgacagcatgatgatcacattcagaaatgacaaagcttgatggaccttcatgcaaacagtaaaaataatttgaaagtctgtagcaacaaggagttaacagattggtttaaataagtataactaaatatataatcctgaatttgggttggaaaaaaccatttgaaagaagaattgatgaaggataaatagcctaataggagcatttatgacaaagggaattttattgttgataaacttaattgtgaatcagccataagatttgcctgccaaaatttaattactgtagttttttgaataaaggaggttggttaggcctggacttggcatgtatccagatttaggtactacctttgagaaaattggcgtatgtccaaatgacagcagtatcagccctttctcatgtggcaaaagaattagacttaatctagccataaaagcagctctgggacataagcccaaaagaaggaagaattttctagtgattagagctgtctagagaataaacaggatgcttcgagaggcagtagtatatttgtgtagtggttttgtttgtttttttgagatggagtcccactctgttacccaggctggagtgcaatggcgtgatctcggcccactgcaacctcctacccccaggttcaagcgattctcttgcatcagcctcccgagtagctgggattacaggtgaccaccaccacgcccagctacttttttctgtatttttaatagagacagggtttcgacatgctggccaggctggtctcaaactcctgtcctcaggtgatccacctgcctcagcctcccaaagtgttgggattacaggtgtgagccaccgtgcccggcctgttttttttgttttgttttgttttgttttgagacagagtctcactctgttgcccaggctgaagtgcagtggctcagtctcggctcactgcaacctccacctccctggttgaagcaattctcccaccttagcctcccgagtagctgggattacaggtacgcaccaccacacccagctaattttttgtatttgtagtagagacgggtttcaccatgttggccaggctggtctcgaactcctgacctcaagtgttctgcctaccgaggcctctcaaagtgctgggattacaggcatgagccaccacgtccggtccttgtatagtgtctgaatgaagctagtttactgctttagtaagaatgttatagagtgaatcaaagttcagatgtcttgaatattggtttgattttacattttttcatatggttactggccatttgtatatcttctttggagaaatattcattcaaatcctttaccctcctcccccccaccactttttttttttttttgagacggagtctttatttttttttgagacggagtctcactctgtcgccaggctggagtgcagtggcaccatcttggctcactgcagtctccgcctcccgggttcaagcaatgctcctgcctcagcctcctgagtagctgggattacaggcccgtgccaccacacccagctaatttttgtatttttagtagagacgtagtttccccatgttggccaggatggtctctatctcctgacctcgtgatccgcctgcctcagcctcccaaagtgctgggattacaggcatgagccaccatgcctagccttacccattttttaaattgggttatttatcttttattatttgaattgtaagagttctctatatattctggacagaagtcccttatcatatatgcttagcaagtattttctcccattctgtgagttcttcactttcttgatggtatcatttgcaaccaaagattttcaattttgatatagtccaatttatatattttttcttttgtcacatgtcctttggtgttgcccaatccaaggtcatgaagatttactatgtgttctcttaagagttgtatagttttagcttttcatttaggtctaagatttattttgagataatttgtgtatatagaggagttggagttcaatttgattcttttgcaagtggacatctagttatcctagcaccatatgttggaaaaacttgttctttccctcactgaattgtcctggcactcgaatttttagaagaataatataacttttatttatttatttatttatttatttatttatttattttgagacagagtctcactctgttgcccaggcaagagtgcagtggtataatcatagttcactgcaatcttgaactcccaggttcaattcttctgcctcagcctcccagagtagctagatgtaccacacctggctaatttatatatatatatatatatatatatatatatatatatatatatatagtagaaccaggatctctttatgttgcccatgctggtcttgaactcctggcctctagtgattttcctgcctcagcctcccaaagtgccgggattacaggcatgagccaccttgcccagccataacttttattttttataaaaaatataataaaaactatggaagataggagagaaagtacagtaaccacgacccccccagtcttagggggatgcgttccaagacccccagtggatgactgaactacagatagtaccagacccagttgctgattgtattaattgaaacacgtttcagttcatgttttccacccacaaatttactgccttttccatcttaactgagcacttatcacacactgtggctataacttttgcagtttgaggtgtgacaggaaaactaacatgaatctctttttccttcacaatttcatggggttgggggaagattcattcttaccataaatctcagcaacctcagcatatgatttttttctttcttgaaatcaagaactttcaccttttcactttttttttttttttttgagacagagtctcactctgtcgcccaggctggagtacagtggcgcaatcccggctcacttcaagctccgcctcccgggttcacgccattctcctgcctcagcctcccaagtagctgggactacgggcacctgccaccacacctggctaattttttgtatttttagtagagacggggtttcaccatgttagccaggatggtctccgtctcctgacctcgtgatctgcccgcctcggcctcccaaagtgctgggattacaggtgtgagccatcgggcctggccaccttttcacttttaaggaagcactttatggcttctctttagcatatctgaattgccagcatcactacttttgcaatttgggaccattattaagtaaaataagagttccttgaatacaaacattgctataatgttacctgacagttgatctgatagccagcctggctgctaaattactaacagctggtagcatgcacagcatagatacactggacaaagggatgattcatgtcccaggcaggacggagtgggatgatgcaagatttcatcgggctgctacagaatggcgtgcagtttaaaacttatgaattgtttatttgtagaattttccattaaatatttttggattgcagttgaccatgggtaactaaaacttcaaaaagtaaaaccatgaataaagagagactactgtaatgcataattctgccaccgttacacaacttccatattattgtttttgttgttgcctaatgttcatctgcagtttatacataatttaataattagtcccttattttgaatatttaagtttaatatttattatttaaataacattgcaatcataatctttgtgcataagctattagctttctattgcttaattttctttgacacatttctgaaaggatttcttctaaacatatattgaaaaccactaggggttagttacataattttgattttgaaaattctgaagtagagggtgttaaataaattggcccatttaacattacaatagcagctgatgcggacctctggctgtgggtcaggcaatgtgccaaatagttgtgtgcataatcatatttagttcttactcaaattctattagataaggaattcaaggctcagaaaagtttgataacttgcccaaagtcatataactagtaaatggcaaagatggcatacagggctgtgtgactctcaaacctcagtggctcccatactggacataaacagttatgatggcaagattcccacagtaatacattagattaaatattttgtacagaaattctctgaatacacatgacttaagtactaatgcattattggcccaaatttttcttttttttcttttcttcttttttttttaacccacagctaatatgatagcttaatatttgtttggtaaaaatggaaatctaaaaatggatttttctctggagatttaataattcgttattcttggacccatggactaatcattttgtattatttccatgtgtgtagcacttaccattccaaagagtctagagagtatacataaccatacagaagttgtttcacttatgagtactttagtaaagaaatggggccaggcacggtggctcacacctgtaatcccagcactttgggaggccgaggcgggcggatcaccaggtcaggagatgagaccatcctggctaacagggtgaaaccccatctctactaaaaatacaaaaaattagccaggcgtggtggcaggcgcctgtagtcccagctactcgggaggctgaggcaggagaatggtgtgaacctgggaggtggagcttgcagtgagccgagatcgcaccactgcactccagcctgggcaacagagtaagactctgtctaaaaaaaaaaaaaaaagaaaagaaagaaaaaaatggttttggccgtgttcagagttttctttaaaacatgaaaatgccagttctgtacaaattcttgttccaaatttctatttttgcagtctttcagcacatcaaactgtataaactttttttcttcttccctgagatggagtcttactctgtcgcccaagctggagtgcagtagcccgatctcagctcactgcaacctctgtctcctaggttcaagcgattctcttgcctcagcctcccaagtagctgggattacaggcgctcggcaccacacccagctaatttttgaacttttagtagagacgaggtttcaccgtgttggcaaggctgatctcgtactcttgacctcaagtgatccacctgcctcggcctcccaaagtgctgggtctgtataaactctttctttccttgattttcatccaaagagttagagtgtatacagattaacaaggtgactggaggtatttgtatgcccttgacagaagagtcacttcagtctgctacaacggtactctttcactacgggtatagtttcacatactattgtgagggaagaaggtacatttacttagcagaagccatccattttatgaaatgccaattccctgaatttacttcttttaaactagttttagttgatcagttttcatcttcttggtaacatttaaaagaatgttcaatttgtttctgctccaattatctgctgctgtttaggaggaggtggacagaaaagaatttctcatattcaaggatataatagcaatgaacgtattttttgtcagtgcagaatttaaagactaagactttaagtctgatcctcttcctttttctgccgcctcagtctctggcaacaatagcagggagttagggcagacaaattgaacattccttttcatgctttatacagattgaaactgatcaactaaagagttaaagaagtgaattcagtgacttgacctttacttgaaatgatttttaataattttagtcagtgatccagaactcacctaagcagccagattagctgagttaatcctaataatgaattgacagatgcttcagttacactgccttcagatcctcaaaattgagaatattcataatggcatatcacaaaatggactatcaagcctaatacataaaatgtacatctgttttggactgaaagattgactaataaaagcaattaagtgatcttttctctagaagtttgtttatactgacttctacacctccagctctacactgttaccagagctcaagcccgtaattctaagaacataagaaacattttacttttcatttcagtatatccaataaagattctgccttgttccacatcaaatagcacctctttaggtttcttcaggctcatacctcattcttttccatcccacccctatttagttattcatctatttctgtcactttttcctttgaaacatgtctcagatttagtcttcattcttgctgcggccaccccagttcagtcttcattactcattgccttctaactttatttttctgattacattcttctttctagtagtaggttaaatttacactgctttcatcatgtgtctccgtgaggtaatcccaggagctctgcaaaattcactagctaatctctgacttaacataggatgtagtatcagaagaatcagctatgatccactagtgcttttcttgctcacttgacagctgcctgctatttgaacaaaaggcatctttattttcattctttcttagatgactctccgatgtgatcctttgcacatatatatggatcacatctgagagtcatttatatatatatatatatataaaatgcaaatacctgcctattattaccttttgatgtgacacacaagaacactgttgcctgtgtcagacattcagcaagcattatagtttagtcccataatctcattttatcaagaagcctaattttgtaggctttggttgtctcattctgccaccagaaagtaaatttcttgaaggcaggcactatagaattttcattctagcacaatttttgacagtttttatgcatttttgaaatttttattgaataaataagttagttgagcaaatatttattgcatttattgagggcttactctgttccagcaactgtgatgatgtaagcagcactgaaaaggagcagatatggttccttagcgtgatcatagttcattacagcttcaaactcctgggctcaagggatccttctgcctcagcctcctgagtagctaggactacaggtgtatgccaccatgcctagctaattaaaatttttttttttttggatagccagggtcttaccatgttgcccaggctgatctggaacttctggcctcaagcaatccacccactgtggcctttcaaaactggtgacatgagccactgtgcccagcgcggctcttgtcttgagtttatgatctagtgagaaaggcaggtattaaacaaatacatggccagttatgatggtctataatggacatcatcagttccttctctttgtgtatatgcatgctatttttcatgtctagaaatagagtctaattcccctctccttgaatctgggctggtcaatagaatgtggcagaaataaacattttggaactttgaggctagaccttaaggctgtaaagcttgtgtctgggtctctggaaatatttttcttgagataatccctcttaaaacccagtcactctgttgcaagaagctcaagccacatggagaggccttgtgtaggtaacgctgatcaatagccccagctgaacttcaatggccagaatcaactggtcctgtgagtgacccattgtgaacatccagtccagtccagcctttagatgacttcatgccccctactgtcttactgcattcatgtgtgagaagatcgagaactacagatctgagctttgtcaatccacaaaatcttgagagataataaattttttttttttttgagatggagtctcactctgttgcccaggctggagtacagtggcaccaccacagctcactgcaacctccacctcctgggctcaagtgattctcctgcctcagcctccggagtaactgggactacaggtgcccgccaccctgcccggctaatttttttgtatttttagtagagatggggtttcaccatgttggccaggctggtcttgaactcctgacctcaagtgatccacccacctcagcctcccaaagtgcagggattacaggtgtgagccaccgtgcctggcctgagaatgaattgttttaagccactaaatttgagtggtttattatgcagcagtataatacattttggttatctaaccagaatgtaaattatcagattatcagattatgataaatgctataatggacatgaacaggaataaaaggaaaacctaatttagatgattcggagatggcaacatacaattgtttaataatgttttgtctttctgctcaactctgcatttggtgagagcagatactgtcctatttttaactgtgtccccagcacgtggcatatatgctcaatatcttctgaagtaataacgaagaccttttattagtgtctcagagaagtccgtaactccaaaaaggttaagaattactttattaacagcaaaactttcctctttatccacttgtataggaataccacatcctacccaagcacaaaattccaggttttctggactgaatacctacacccaggatcgatgtgaatagggcagtattttcctgccagaggttataggtgatgcctttgagttttggggatttaatcataatgggctacatcacatgtatggaggttacgcaggtaatgagagggactggggccaaggagcacacagatgagtctacttaatggaagaaaactaagcctcagatgaagtctgttattctataaatagcctctgtattccttaaccctttttcctgttattccttccatgaactttctgcttaatttctttcattttaatgtgtttcagggactgattctcctctaaggttgcacctaacacttttcttccttgcccatttcttccctatacaccattcttattcccatctttgtgtctttcttattatgtgtttctcccattttctagggtatttttccttctttctgcttatgtaaatttaatcttttgggagtattttaagtttacttcactggaactttccttgaagattccaagttaaatatgcctctccttcctgagcttctattttacttatttgttcccaggacatgacttttgtcatatccttttgtatcttgccttatacaataataattattatagtaataataattattactatatgatattatatagtaatattatatagtataatatattgtaactaattattattaccacaataatgattactattatttttgagacagagtctgactctgccaccaaggctggagtgcaatggtgtgatcttggctcactgcaatcaatgcctcctggggtcaagccatcctcccacctcagcctcctgagtagctgggactacaggtgtgcaccaccatgccctgctaatttttgtatggttttgtagagacagggtttcaccatgttgcccaggctggtcttgaacttctgagctcaagtgatctgaccgccttgggctcctaaagtgctgaatgctgggactacaagcgtgagccactgtgcctggctcatatcataattatataatttttcaactctttcctatgtaacatggctataaatacttggaacagtgattattttattttataagaattttactctttttttttttttttttttgagatggagtctcattctgtcaccaggctggagtgcagtggcatgatctcagctcactgcaacctccgcctcctgggttcaagcgattctcctgcctaagcatcctgagtagctgggattataggcacccgccaccacacccagctaatttttgtatttttagtagagacagggtttcaccatgttggccagatctcaatctcttggcctcatgatctgcccgccttggcctctcaaagtgctgggattacaggcatgagccattacgcccagccgaattttactactttttaagtgggtgtttaataattatgttggcttgatagatgctctgcttttcttttttattccatttgaacttgactctctaattcctcttgaattttcctgatttgttatactcccttcttcatcttttaaccttgaatctttgttatttccttctttgctgattcccatgatctttctgtctctactacatgtatatgtaatatatgcacacaaagatatatactactacatataatacactaacatcacattttaaagtaattattaatgcctttgtaaaatatttattattattattattattttttttgagatggagtcttgctctgtcacccaggctggagtgcagtggcgcgatctcggctcactgcaagctccgcctcccgagttcatgccattttcctgcctcagcctcctgagtagctgggactacaggcacccaccaccatgcctggctaatttttttgtatttttagtagagatggggtttcactgtgttagccaggatggtctcgatctcctgacctggtgatccgcctgcctaggactcccaaagtgctgggattacaagcatgagccactgtgcctggccaaaatatttgttattatgtttatatagtgataaagttaatctacatctgagatctggaatataaattttacattaaatacaatattacttgtttatatctgtacaattctgtatttacaaggtctcaacatctattttatccacatcgataagtagaatttaatacttctatataaactgtgtatataccacttttattttattttgcgacagggtttcactctgttgcccaagctgaagtgcagcagcgcaatcttggctcactgcaacctctgtctcctgggttcaaacgattttcgcatctcagcctcctgagtagctgggactacaggcatgcaccactgtggcctgatctcagctcactacaacctccgcgtcctgggttcaagcaattctccctgcctcagcctcctgagtaactgggattacagatgcctgccaccacacctggctaatttttgtattttttagtagagacagggttttgccaagttggccaggctgggtataaactcctgacttcaggtgatccgcccacctcagcctcccaaagtgctgggattacaggcaggagccaccatgcctggccaatttttaatttttttttagagacaaggtctccctgtgttgcccaggctggtctcaaactcctgggcttgaaatcctcctgcctcggcctcccaaagtgctgcgattacaggtgtgggccaccatgcctggcccaatttattattatttattttttgaagtattttatgttatttttaacttttagcttcaggggtacatgtgcaagtttgttatatagataaattgcgtgttgtggggtttggtgtacagattatttcatcactcaggtaataagcatagtacccaataggtagtttttcaatcttcactcttctcccactcttcatcttccggtaggccccagtgtctgttgtttccttctttgtgtccatgtgtacttgatgtttaactcccacttataagtgagaacatgcaatgtttggttttctgttcctgtgtaagttcgcttaggataatggccttgagctccatccatgttgctgcaaaggacatgatctcattcttttttatggctgcatagtattccatagtgtatatacaccacattttctttatccagtctaccattgataggcatttatgttgatcccatgtctttgacattgtgaatagtgttgtgatgaacatatatgtacatgtgtcttttttttttttttttttgaggcagagtcttgctctgtcacccagactagagtgcagtggcatgatcttggctcactgcaacttccgcctcccgagttcaagcaatccttgtgcctcagcctcccaagtagctggggttacaggagcccacccccatgcccagctaattttctttgtatctacagtagagacagggtttcaccgtgttggtcaggctggtcttgaactcctgacctcaagtgatctgcctgccttggcctcccaaagtgctgagattacaggcatgatccaccacgcccaacctacatgtgtctttatggtagaatgttttatattttggggggtatatactcaataatgggattgctgggtcaaatggtaattctgttttaagttctttcagaaatcaccaaactgcttttcacaatgggtgaattcacttagattcctgctagcagtgtgtaagtgttccctttttgccacaaccttgccagcatctgttatattttgactttttaataatagccattctggctgggtgtgggggctcatgtctgtaatctcagcactttgggaagctgaggcaggaggatctcttgagcctaggagtttgagaccagcctgggcaacaaagtcagaccctgtctctacaaaaaaatcaaaaaattaactggatgtggtggcgcacgcctgtggtcccagatactcgggaggctgaggcaggaggattgcttaagcccaggaggtagaggttgcagtgaactatgtttgtgccactgcactgtagcttgggagacagagtgagacgctgtttgaaaacaaaaaacaaaaacagctattctgactggtgtgagatggtatctcattggggttttgacttgcatttctctaatgattagtgatgttgagtattttttcatatgtttgctgggtacatgtatgtctttttttgaagtgtctgttcatatcctttgcccacttttaaatgttttgttttttgcttgtgaacttgtttacgtttcttatagattttggatattagacctttgtcagatgcatagtttgcaaatattttctcccgttctgtagtttgtctgtttactctgttgacagtttcttttgctgtgaagaagctctttagtttagttagatcccttttgtcaattttttttgttgcaattgtttttggagtctgatactgtcacccaggctggagtgcagtggcacaatcatggctcactgcagccatgaactaagctagcctcttcctttagcctctggactggctaagactacagatgcatgccaccattgctggctaattctaaaattttttgtagagacagggtctcattatggttccccaggctagtctcgaattcctggcctcccatgatcctccctccttagcctcccaaagtgctaggattataggtgagagccatcctgcccggcttggttttttcccatggcactttatttatttatttagagacaggggctcactcagtagctgcgactacaggcatgtgccaccaagcctggctaattcttgtatttttgtagagagaagattttgctgtgttgcccaggctggtctcaaactcctgggctcaagtgatctacttgccttggcctcccaaaatgttaggattacaggcgtgagccactgtgcttggcctctatggcactttaatttgacattgacctttatcttttaattaagtattatttacttttgtttttattctccagcatttatataaaatttttgaggcatatggaaaaattgtaggcattgaacagtgaacacccatatacccacaactttgattctacaattaatgttttactgtatttgctttatcacatcttctatatgtttatacatcattctatccattttgtttttggttgcattttaaagtaagctgtggccagccatggtggctcacacctgtaatcctagcactttgggaggctgaggcgggtggatcacctgaggtcaggggtttgagaccagccttgccaacatggtgaaaccccgtctctactaaaaatacaaaaattagctaggtgtggtgacgggtgcctataatcccagctgtacttggaaggctgaagcaggagaatcactggaactcgtgaggcagaggttgcagtgagctgagattacgccacttcactccagcctggacaggagcgaaactccatctcaaaaaataaatcaataaagtaagttgcaaagtttgcccctaaaaaacaaataatttactgtagctcaatgtttgtttatttttttcaagtttccaacaagtcattgattactttttaaaaagtaaaatttatatacaatacaatgcgtaaatcttaattgtgctatttgatgaattttgacagatgcatgtatctgctaactaatatccctatcagaattagaacattactgctattccagaaggtttcttcacaccctttcccagtcagtcttcacccatgctgcccagaggaaccattactccttttttcaccatagattaattttgcctattctagaatcccatgtaaacagaagcatatagtagagacacttttgtggaaagcttctttcagacagcatgttttttgagattcattcatgtcattgcatgtattcagttatttctttttattgctgagtagtatttgattgtgtgaatgtaccacagttttttcatttattctcctgttgatggacatctgagcggtttccatttttttggctactattaataaagctcctatgaacattctcgtgcaagtctttttgtggacatggcttgtatttctctaaggtcctaggaatagaaatgctggatcattaggtaggtagatatacatgtagtttttaagaaactacctgatattttccaaacttgttatatcattttatgtggccacgaaaaatgtatgggaatttcagttgctccatctcttcaccaatgtttggtgttatcagtcttttaatttttggctattctcttggcaagtgacacttgtgtattgaggacaaatgtaaaaataaataaataaaacttggctagtctcgtgggcatgtaatagtatcttgtacttttaatctgcatttccctgatgacttatgattttgaggatcttttcatgtgcttattagccatttatataacttcatttgtaaagtgtccagttattttgcccattttaaaattgtttgtatttttccttactgagttataggagttcctaacacattctgaatatcagtcattgttggatatgtgttttgcaaatattttcttctgtgtgaattacgttttttgtttgttttttttttttttttgagacgaagtctcgttctgttgcccaggctggagtgcagtggtacaatctcggcttgctgcaacctccacctcccgggttcaagcgattctcctgcctcagcctcctgagtggctgggattacaggcaggcgccaccacgcctaatttttttatttttaatagagacagggtttcaccatgttggtcagactggtctcgaacttctgaccttgtgatccacccgccttagcctcccaaagtgctgggattacaggcgtgatccaccgcacacggccctattttttttttttttttttttttacgcaatagtgtcttcagtcagcagaattttaaaaatttgatgaatatctatttttttcttctattgttactgctttgctgccctactaaacttttgcctatccccaagttgcaaagatattttcctgtgttttctgttttcttttcttctttttttttcttttgagatggagtctcactctgtcacccaagctggagttcagtggcatgatcttggctcactgcaccctctgcctcctgggttcaagtgatactcatgtctcagcctcctgagtagctgagattacagatgcatgccaccatgctcggctaaattttgtatttttagtagagatggggtttcactatgttggccaggctggtgtcaaactttactgacctcaagtaatctgcccgcctcagctcccaaagtgttgggattacaggcgtgaaccactgtgcccagccctgtgttttcttatagaagttttatgtttaggtctctgatccattgcaaattaatttttgtatatagtgtgagataaagcttaaggttcatttattttcccatctagatatccagttgttctggcgctatttgttgaaaagacaatttcccattggattgctttggttcatttgttgaaaatcagttgatagtgcaagtgtgggtcttttcagtgttctctattttgttgatatgcttgtctatttatgacagaatcatgctgtcttaattagtgtaatttcacattaagtctttttttttttgagacaaggtcttgttctgtcacccaggctggagtgcagtggcgccgtcagggctcactgcaacctccacctccagagctcaagctatactctcacctcggtcccccctgagcagctgggaccacaggcgtgtgccaccacactcagttacttttttttttttgaaatggagtcttgctctgtcacccaggctggagtgcagtggcacgatcttggctcactgcaacttctgcctcctgggctcaagcgattcttctgcctcagcctcccaagtagctgggactacaggtgtgcaccgccacgcctggctacatttttgtattttttgtagagatggggtttcactgtgttggccaggctggccttgaactcctcacctcaggtgatctacccgcctcagcctcccaaagtgctgggattacaggcatgagccactgcaccttgccaaattttttgtattttggtagagatggggtttcaccatgttgttcaggctggtctccaactcctgagctcaagtgatctgctggccttggcctcccaaagtgctgggattacaggtgtgagctaccatgcctggcctcacattaagtcttgaaattaggtaatgtaaattatccaaccttgtttctccaaattgcttggattttatagatcttttgcatttccatataaattttaaaattaagttttctgtttctacaacattcctggtaggaatatgaatgggattacattgactatgtgtgtaaatcaattagcaaagaaagtaaatcttattgaatctttcaatccatgaacattataaatatgtatatatacatatagatggatgttgaactttgtcaaattttttttttctgcatctatttggatgactatatgatttttgtcctttatctgttaatgtggtcattacattaattgttttttcaaacattaaaccaacattgcatttctggaataaatctcatttagtcatgatgtgttatcctttttatatactgctagattcaatttggtactattttgttgtaaatatttacatctttgttcatgaaggatattagcctataatatttttctttccttctctcttcctttttttctttttgtaatttctccagctttggtattgggttattttggcctcaagaaatattgaatattgtctcttctgttttctgaggttgtataagatgttatttctctaagtgtttgacataattcaccagtaaaactatcttggcatgggttttctttgtggggaggtttttgataacaaagtcaatttctctgatagacaaggggctgctgagattttctctttcatcttatctaagtcttcgtaaatgatgtattttaaggaatttgtctatttcttctaatttgtcaaacatattgagataaaattgtttataatagtcttttattatcattttaaggtctgtgggatcttaggtgatatcctcttttattcctcacctgggtgatggtctctgttctttttcttgacctgtctagctagaatattataaattgtgttgactttatcagtttcactgatcttttcaaagaaccaacttttggctttattaattttttctgttttttgcctgatttctacttcattgattgcaattctttatcatttctttccttttatttactctgggtttactctgctcttcttgatttttaatttaattctgctggggtcagagaacataccctatattattttgattcttttatttttattaaaatttattttatttcacaatatattctatcttggtgaacatgccatgtacacttggaaagaaagtgtattctggccttgctggatgtagtgttctataaatgttgattaggtcatgttggttgttagtgtttttcaaatcgtatacgttttcattgatattgttaagtgagaggagagtgttgaaatctccaattgtgattgtaatttagtccactttttcctttgattctgtcaatatgcttcacatagtttgaaacttgtttgacaaacatacatatttatgactgttgtttgtttgttccttatgaattaaccattttatttttagataaatgtccccctttatctctgataatattgtctttttccccttcagtcttttttttttttttttttgaggtggagtctctttctattgcctagactggaatgcagtggcacgatctcggctcactgcaacttccgcctccctggttcaagtgattctcttgcctcagcctcccaagtacctgggactacaggcacgtgccaccaggcctggataattttttctatttttagtagagacggggtttcaccatgttagccaggatggtcttgatctcttgacctcgtgatctgtctgcctcaacctcccaaagtgttgggattacaggtttgagccaccacgctcggctccccttcagtttttttttaatttttattttttttgagacagagtcttgctctgttgcccaggctggagtgcagtggcatgatctcggctcactgcattttccgccttctgggtttaagctattcttgtgcctcagcctcctgagtaactgggattacaggcacatgccaccacctccaggtaattttttgtattttcagtagagacagggtttcactatgtttgccaggctggtcctgaactcctgatctcaagtgatccacccacctcagcctcccaaagtcctggaattacaggcgtgagccatcatgcttggcctccccttcagttttattgaggtgtgattgacaaacaaaaaattattgccaaggccagttgtcaaagagctttcccctgtgttttcaactaggagttttatagtttcagatcttatgtttaagtttttcatccattttgagtagatttttatgtatggtttaataagggtccaacttcatattttttgaatagggatatccagttttcctaccaccatttattaaagaaactatcctttccctgttgtatcttcttggtacctttgttgaagatttgttgaccatataggtttgggtttctttctgggctttctattctgttccattggtttctatgtctgtttttatgccagtgccatactgctttgattactgtagttctatcatataatttggaatcaggaagtgtgatgcctccagctttgttcttctttctctagattgctttagctactcgggatcttttgttgtactattaatatacaaatgttaggggttttttttctattttttgtggaaaataccattggaattttgatagagattgcattgaatctgtagattacattggattgtgtaggtattttaacaatattcttccaatccatgaacacaggatatctttccatttatttgtgtcttcaattttttaatcaatgttttatagtttttcatattcagatatttcacctctttggttaaatttgttcctaaaactattttattacttttgatgttactgtaagtgggatttttatcttcattgttttcatgtagttcactgttagtatatagtaatgcaactgatttttgtgtgtttttttttatcctacaaatttgcagaatcatttattagttctaacagttcttttgtggagtctttagggtttcatatatattagatcatgccatctgcaaacagagtcaattttacttcctcttttctcatctggatagcttttatttctttttcttgcctgattgttctaactaggacttcatagttctagttttgttctatgttgaatagcactatgttctagttttgtactatgttgagtagaaatggcaaaactgaggaccgttgtcttgttcctgatcttaaaggaaaagcttttagcttttcaccattaagtatgatgtttagctgtgggcttgtcatatatggcctgtattatacgaaggtacattccttcaatacctaatttgttgaaagttttttatcaaaaaatgatgttaaattttgttgagtatttttcctgcatctcttgaggtgatcatatgatttttatccattattctgttattgtggtatgtcacatttattgatttgtatataatgaataattcttgcatctcagggataaatcgcacctgatcatggtgcatagtctttttaatgtgctactgaatttggtttactgaaattttgttgagggtttttgcatttatgttcatcagggatattggcactactaacatttcaagccagataattcttgtttgttggaggccttgtagaatatttagcagcctacctggcctacaccaccaaataccagtagtacctttccctacttctaacaacctaaaatgtctccagccagatgtcccctaaggggcaaaatcattttcagtcagaaccactgtttagcagtaacctgtaagacaaaagtataccaaaaagtagaagtaactttatggattcctagatcagtgtgttctgctatcactgtcttctaggctgccaggatttacgcttttaatagtgtagtctagtactaccttgccattatgttcagaagtaaatgtgaatttaagttgaatagtagtgttttaaaatatgtaatccaaatattcctaattttttattttattttgttttgtttttagggacagtcttattctgtcacccaggttggagtgcactggcatgatcatagctcactgagaccttaaactcttaggctcaagcagtcctcctgcctcagcctctcaagtagctgagactacaggcctgtgaagccatggcagctaattttttaatattttgaagagactgggtctcactatgttgcccaggctggtcatgaactcctggcctcaagcagtcctcctgcctgagcttcccaaagtgctgggattacaggcatgagccaccatgcttggcctccaaatattagtttaaatgaaagctgctttttctatttaaaattttaaagtgattggttttgaaaactttttaatgttttcatcattataggtgatatctatcataaggtatttttgaaccttgtttttattatactcataaaagtaatacattaaaacagataatggaatatgctctttttttcttcctaccaaaacattattctctaactagatttgtcacccagcttttagtgaattatgagttctcaatattttcatacacttttggaagacatggagatagggaagggggatggcaattcgagtgcataaaaatagtttttactttacatgttgtgactcacttaagtttcattattataataaatgttaaagatattccatctactttttatagtttctgaatcatttgctcaggtataatagttatttgatatgaataaatttgagaaaatattatttaaaatatactctgttacagaatcttcctgccattatttttttaaattaagttcattttattttattgatatataacattttacttatttaatggggtacatgtcatattttgttacatagaatgtgtaatgatcaagtcagggtatttggggtacccatcttgagtatttatcatttttatatgttgggaacatttcaaattctctgttttagctgctttgaaatacataatacattgttgctaactatagttacctactctgctatgccttctatctaacagtatttttgtacccattgaccaatctctcttcatctctaccttcctcccaccccccaccataccctgcccagcctctggtatctatcatcctactttctacctccctgagatcaactttttaaaatttttattttttatatagttttttttatttcaataggttttggggaacaggtggtgtttggttacatgaataagatctttagtggtgatttctgagattttggtgcaccagtcacccaagcagtatacactatacccaatgtgtagtctttcttttttcttttttttgatacagagtttcactctcgttgcccaggctggagtgcaatgccgcgatctcggctcacctcatcctctgcctcctgggttcaagtgattgtcttgcctcaacctcccgagtaactgggattacaggcatgcgccaccacagctggctaatttcgtatttttagtagagatggggtttctccatgttggtcaggctggtctcaaactcctgacctcaggtgatccatccgccttggcctcccaaagtgctgggattacaggcgtgagccaccgtgcccggccccagtgtgtagtcttttatccctcaccccctattattactgaatgatgccattatcattatatagatacacagattcgcttctatatactaccattttttccagatatttcataataataatatgtgacctcactaaaatacccctgaatggaaagaaagtcatcatactagtagcattataggaattagaaaacaatgtgcggtttcattttctgatcatcaaggatctggaaatactgtttttctgtaatacgaagaaagcaagtatgtttctttgtatctatgtaaaatcatatcacttatagttaagaataggaagcctaaaatgtatgatttgtttcaatatggatccagaccagttcctggtaactttttaataggaggttcaggctgttctgctaaaaaaaaaaaaaaaaaacaaaaaaaaaaaaaaaaaaaaaacaaaacaaaaaaaaaactatatgtagcatttgatacttaattgtagtaagtactgtcaattctctcctccgtgtcctgtctcgtggcacttaacttgaccaatttatataaaaagaagactttcttctgaaagtagggagtatctcagttttacaaataagcaaacaaacatctggaattgaaataacttgcttaaggttgtggagtttatagcagcaaacctaggtcttttgactccaaagtctatgtttttttttccttcttatcaatgcgagagtacaaagtctattattacctatcattttgccgagaaaattagtatgattagaagggtaagctatgtgggaaagggatggatgtaaaaagttagttgtcgacagtatagggattgagttgaaagaataattagatctgttttctaactaataaatggtaaaaaaaaaaatgtgataggaaaaaacttaatgtgtgagagtttccagccttctgctcttcgtctatgtgctaatgatagttctacctttactaattcaattttttccttttctcctgtctccaacaagggctcagcatttgtcaaactagatctttggggatttgtaatatagacttgacttgagagagagggatgaggtggaaggaatatgaaagtggctgccacaggatcacaggataacctaattatcttgttttgttttgttttctttttttttttttttttttgaaatggagtctccctctattgcccaggttggagtgtagtggcgccatctcggctcactgcaacctccacctcctgggttcaagcgattctcctgcctcagcctccagagtagctgggactacaggtgcgtgccaccacgccctgctgtgtttttttttttgtatttttagtagatacagggttttaccatattggccaggctggtcttgaactcctgacctcgtgatccacctgcctcagccccccaaaggctgggattccaggtgtgagccaccatgcctggccttgttttgtgttttctacttcatactctgtcatggttgcattaaaaaaaattttagtagaggtcttcaaatcttacagtgaatgctgatacctcctaattgtagcagcattagaaaatgtcttatgataattgttgaacttggatacatgagatttaatatgttattctctttacttttgtgcatatttgatactttccataataaaatgatttttgggattttttaaaaagaaaatgttttagtgaacatacttgattgctaatttctttctttattcctggaatatcagaactatatcttgtatattactattgtgtatttcagggtgcctaacataatactcattcactaaataaacatctgagttgaaatgaatataatatttagttgcttaattttaaatgtaagttatacttaagtagcagttagtatataaagtgaaaaatgtggtttttggtgaattctataaaggtgagaaaatgttctggaattagataacggtggcggttgtgcaactctgtgactatactaaacaccattgaattatatactttaaaaaagtaagctgtgtagtatatgaatgacatatcaatttttaaaaaggcaatgtaaaaaaatacaaagataagtcataaactgggagaagatacttataacacaaataactcataaaagaactctcacaaatggataaggaaaagacagccctatagataagcagacaaataaaactaatggacatttcacaaagagaaaacacgaataggcaagaaacattttaaaaggtacttaacctcatttgagataaagagatgcaaattataacctcaatgaaataagcatttacacataccagacttacagaaattaaagaattggatcatcccaggtaggcaaaatgtaaaggaacgtgaaccctcatatactgctagtaagattctttaactggtacaaccactttggaaagatgttttggtattacctggtaaaactgaagttgcaaatgccctttgaccaagcagttctactactagcagtgcgtatgtgtgtttatatgtgtatgtaatctgtcctttccctactgattgttaatatcacatttatcaagttatcatattttcatgggtctatttctaggctctctagtatgttaaattggtgatttgtttatccatgcagcaattttatgctggcttatttactataattttaaaataagttttaatgcctagtaggatcatcttctttcagaatgttcttcagggatgtttggctatttctggtcatttgctcttccatataacccttaggatcaatttgtcaagtcttatgtcttgttgggattgttattgaaattatattgaattactttgaattgataggtcattttgaaaataattttctggactgtatttctccatttatttaggtctgtcttaatgtctttaatttaattttacaattttctttataaacttatcatagtcttttgttatatttcttcctatgtatttatgtgtacgtgtgtctgtgtgtttgtgagacagagagagggagggaggaaagggggagtggaaggaggagagagaaaaagagtataaaattaaacatcaactaaaaaaacagctttattgaggtacaatttacataccataaaatttactcattttatgtgtacagttcagtgatttttagtaaatcttcagagttgtgcaatgatcactacaatctaattttagaacatttctgtcaccctaaaaagaaagcttgtgccagtcactcttggcacacttgttggcagtcactccttgttcccatccctagcccgaggaaaccaccatgtagtttaaaaaaaaaaacttattttaagcctttttagtatgaacacttaaaaatacacaaagttgacaaaatagaacaatgactctcaaacaaccaataaggacaatcttctaacttctcacctggattgttttaaaacaagtctcatttcttctataagtatgtcagtatgtgtctccaaggtatgatgatttcttcttaaattgaagtataattttagtttcattatcacacctaaaaagattaacaattttttttttaagagatagggacttgctctgtcactcaggctgtaagtgcagtggtgagatcatagcttactgcagccttgaatttctgggctcaagcctgcttcagcttcctgagtagctagaactacaggtgcgaactaccatatctagctaattaaaaaaaatttttttaatggagaagggtcttactatattgcccaggctggtcttgaactcctggcctcaagcgatcctcccaccttagcctcccaaagtgttgggattacaagtgtgaaccactgtacctggccaaattaacaaaattttttttttgagatagggtcttactgtgttgcccaggtgggagtgcagtggcgcggcttaactgcagccttacctcccagactcaatcctcccacttcagcctcccaaggtagctaagactatagacatgctccacaaggctgggctaatttttgtttattttttttgcccagggtcttactatgtttcccagactggtctcaaactcctgggctcaagcagccctgtagctcggccttccaaagtgctgggattacaggcatgagccactgtgcccagcccccctcatttttttcattgccacttatctgttgaagaaaccagatcatttgttggtagactttcttacattctggacttggctaattgcattcttgtgatatcatgtaatatgcttttatatcatatcttctgtaaaaaggtaattagttctagagcagcacatgctgtgcccttagaaatacaaattacaaatgcaagccacataatttaaaattttctggtagctgcattaacaaaagtaaaaagaaaaaggtgaagttatcttaatgacacattttgttcataccagatattaaaaatattattttaccacgtaatgtacataattattagtaagatattttacagtctttttttgtaccaaatctttgaaatctgttgtgtattttacatttgcaacatttctcaattcaaagtagctacatttcaggtgcttagtagctacgtgtggatagcacagatctagaggtctgattttaggcttgagtttttgtcaagaataattcatatgtggtgctgtgtacttttttgttttttttttctgagacggagtctcactctgtcaccaggctggagtgcagtggtgcgatctcagctcactgcaacctccgcctctgggttcaagtgattctcctgcctcagcctcccgagtagctgggattacaggcacgcgccaccatgcccagctaatttttgtatttgtagtagagacagggtttcaccatgttggtcaggatggtctcaatctcctgaccttgtgatccacctgcctcagcctcccaaagtgctgggattacaggcatgagccactgcgcccggccgctgtgtactttacattgcatttcaacaggaagcaaataatatatatatatttttgtgatgttaagattggtccaaaagttcaagtgccgtcagcctaatcattcagtacctgctgccccagcctttcaccttatggttttagctgcctttgatgatctttgcctagatttatatttcattagtgattcacaatagtgactgtgtaattctttcatttcttctgcatctaatagttgaactgttctataaagaaaaattttctctcatcagttgttcttctactgaagtatttttctgtcgtagttattctttttattatgaattgttatggcccactatatggtcggttttctgttcttttcttttttttgagacagagccttactctctcacccaggctggagtacagtggcacaatcttggctctgtgcaacttccacctcccgggttcaagcgattctcctgcttcagcctcccgagtaggtgggattacaggcacgcgctactatgcctggaaaatttttgtatttttggtagagacggggtttcgccatgttgaccaggctggtctcgaattcctgacctcaagtgatccacccgccttggcctcccaaaatgctgggattacaggtgtgagtcacctcacccagccttgttttgtgaatttggattgtgcatttttatgttcactgatactgtatctcaagatgattttcatattttagctagcatttttaggtgacatgttgaaaggtattcagggtaaattagtgttctatttatctggaatggacggtgttaaatattaatatttttatttaattcattagggaaaaatgggtgaactaatatatctgtaataccataaaataggactctgccttttaacgcagaaaatttggaatttatcctttgcactattgtctcaaaagtgacaatcttcttggcaaccaaattgcattacatcttcaatatctgttattaatttgtatgcattgcgcaatctgaacagaagtggtagaaaaaaattgagacttttttcttttgtattgttaactgttatgttaaactgtaggcatctatgtgactgtgaagtatctttttacctgtctcaataaaatgttactaattattctttaacaggtacaaagtgaattaatttgtgctgtttttcttttttttttgagacagagtctcactcagtcgccaggccggaatatggtggtgcgatctcagccctctgcaacctccacctcccggggtcaagcaattctcctgcctcagcctcccgagtagctgggactataggcgtgtgccaccatgcccagataatttttgtatttttagtagagacagggtttcaccatgttgatcaggatggtctcgatctcttgacctcgtgatccatccaccttggcctcccaaagtgctgggattacaggtgtgagacactgctcccggccaatttatgctgtttttctaatggtaattttgtgtttgcagttcatatccttagctagaaaagaaaaaaaatatataagaccttgctcattaaatcctgaaagataaggaactaaaaataaacacaggacagatgtctcagaattccattttttttttaattctctaataagaatagggatttctaattagccaggtgtggtggcaggcgcctgtagtcccagctaccagggaggctgaggcaggagaaaggcatgaacctgggaggtggagcttgtaacgagcccacattgcgccactgaactcccacctgggcgacagagcaagactctgtttcaaaaaaaaaaaaaaaaaaaaaaaaagaatagggagttctaatatagtctgttcaacaactgtataatagaatccatagcaggagatatgtttgatagtagttctgtcataagaaaatggtaggagattgaagtcgttgcacatcattttagtccaaatgtcatctgatcacctgaggtgcctagaagtatttactttcttacattgtttgagggatatatttttgttttaaccatgaatagcacacactgttttattttatttatttatttttttgagatggagtcctgctctgtcgcccgtgttggggcatgatcttggttcactgcaacctcctcctcctgggttcaagcaattctcctgtctcagcctcctgagtagctgggattacaggcacacaccaccatgcccagctaattttttgttttttgtttttgttttttagtagagatcgggttttgccatgttggccaggctggtcttgaactcctgacctcaagtgatccacccgcctcagcctcccaaagtgctgggattacaggcatgagccaccgtgcccagccacacacttttttatttggtagatttcctcaagtcttttcagaagcaagtgaaatacaaatcatgaaaaatgaaaaagaatattattcttcctcccttcaatctctgtggctcagtcttaaggcccaaacagtgatacatgtttgttttatggcagtagtcataataatttgtgatgtggcagtgagagatgagggaaatattttgaatcactgcctacaagatatgatgttcattattgttctcaagttatttcatatgtttattctttctcccctaaagaaaacccaggatcttttatggcaggcactgtcttctacttttatgtatctctatcctctttttgtcagacttcaggcccatataaatttccagcttgtttaaaacatttttgccttggctaccttgtacaatgggatctttttagcctctttcttatgaaaacctcataccttggaatttctcttactattgatagaaaaattatgcacatggtagagaaaagctcaatctaacttgtcttcataggacttccatatttagggaaagaccctaagatgtcgtgctggatcatttgctttttgatatatccagattgctccttatcccaatgaaaacagataaaggaggttgtactgtaattagctaattctgtaattcttgccaagatagtaggggttgttcattgtgaacacattctgccacaacagctgaggtagaacattgtgtttatttgtgagagaatttgagtatgaacaatttggtttaaagattaaatgggggaataaattatattgataaaactgatgaaatattttattaaaaattactaagttacacagaggagtttacatttaaagcattaaatatactgaacattgtagaaattgaaaattctgtctgtatttcatttggaagagtttctggctttcctcttgcctttttgagaagtagacatatgtactggaggcaacctagcttggtgtgatgagcaacagattggaacacagagcagcactaggtgtacagtgtcaggaagtccaactcagtgggtgtttgttatgcacaaggaactttgacaggcattattgtgggagagggtggttgaggtggatataagcatgaataagaaatagtcccctaaataatgtaaaataataatgtaatggaaatggaattagataagtaaataatagaaaatagaatgaaacatgttaaacagagtttccaataacatgctaaagaagaacacaggaaaaagcagtgaatattgattaggaaatcagagaagatgtcattaagaatatagcttctaagttgattctagaaaaagagtagtattttgttagatggaagatgggaataggagtgtgaagatctctttttggaggaactggtaaatatggaggcatgcattgccaagacaccaattttattgaaggataaaggagaacataaggtcaaactatcagtgtttaatatttactctgtaataattaacatttctgtaatatttttatatacacatttgagacttctaacaacagccaagggagctatgtattactaccccaatatatacatggtcctgtgtaatttaatggaaggctctggatttgaaggctaactttgtcacttaaaagctatgtgaccttgagtattatttgatattactgaatctcagttttctcatctaccagatacagataataccttttcagtaaatcacttcagggctgctgcatagactgtacagtgcattattccaggggtggtgttcacacagaccaggggttgacaatgttttttttctgtaaagagccagatagaaaatattttaggctttgctggccataaaccataagaaagctgtcacaccaactcaaccttgctgttatagcacaaaaacagccataggcaatatgtaaacaaatgggtatagctgtattctaataaaacttcatttataaaaatagattctgggccagatttggcccacagtttgaagtttgctgactacataggccaggatgtgaatggtgaaccctttagttgtgcaattctgtgatacaggttgttttaaggaataaattacttatagcacagaaatatttctagcttagtacatgtgaatcctcaacgataaaagtctatatacttttctttctttcctttttaaagttattgccattgaattcttgggtaaaccacttaaacttttgccctctatttacttcagaattctcagtagggaaataaaaactatcttttaccagattaactttaattaggtgtatgagttagagtgataataggtgactgttgttttgaattccttaaagtcaatgttaactagaaattataagacattattatagctgaatgccattgtgttagcagtcttaactacaacataacagggaacctgaagcctaaactaatggcactatttggtgtcttatgtgatttgctactatttgtaaactaaaatttttacctggagaatatttattgttttggatttcagcataattagcatatggtcctgattttggtacccacgacatagtttttgtcagactgtcattgcatcattcttgaaatatagctaataattgaaaagaaagagtatgcgttcttttagagatacctagaaagagtggggaggatgtgaactttcttttgctcttacttattatagctctgttaatgctgttcctttcaaagaatattttctaaggtgtttttccctcggtgctttgaaaagttttcatatcagattatgtaaatcaaatgtcgattatgtactagagctgattttgacattgcttttgagtcttagtttaggaataacaaactaattgcaagttttaggatattatatgctaatcattattgtgagaagattatgatgttgaattgccatacataattctgttttcccactcttaatgataagagagattttttatagttgtcattttaactgtggaataaagggtttcctattttcatatttgaaaatatttccttccccttactccatatagaactatcacgtacattctacctgcattatgataaaaaatattgataaaataaaaatattgatacaataaaaaattttaatcataatgcagatagaatgtgtataatatttctttttttttgtttttttggagtcggagtcttgctctgttgcccaggctggagtgcagtagcatgatctcagttcactgcaacctccgcctcctgggttcaagcagttctcctgcctcagcctcctgagtagctgggactacaggtgcgtgccaccacgcccagctaatttttgtatttttagtagagttggggttttaccatattggccaggctggtctcaaactcctgaccttgtgatccgcctgccttggcctcccaaagtgctgggattacaggtgtgagccactacacccagcctgtatgtaatatttctatatggagtaaagagaaggaaatactttcaaatatgaaaacataaaatatatataacataaaatttattattataatcatttttgagcatacaattcagtgacattaggtacactcacaatgttgtgtaatcatcaccaccatccatctccaaaactttttcatcagcccaaatcagacttcatacccattaaacaataactttccatttcttccttcccccatcccctgccatcccctagtaacctctattctacttttcatgtctatgaattgcctatttttggtctaggtactgcatgtaagtgtaatcatataatatttgtccttgtgtgcctgtcttatttcacatagcataatgttttcaaggttcatgcatgttgtagcatgtatcagaatataaatatatatatatatatatatatattttttttttttttttttgagacagggtcttactctgtcagccaggttggagtgcagtggcgcgatctcagctcaccgcaacctccacctcccaggcccgagtgatcctcccacctcagcctcctgagtagctgggcctatggcgcatgaccaccatgcctggctaatttttttgtatttctggtagaggattttgccatgttgcccaggctgggctgaaacccctgagtggaagccatctgcttgccttggcctcccaaagtgctgggattataggtgcgagccaccatgcctagcctcagaatctcatttttaaattactgaataatttcaattgtatgtctataccacatttgatttatccatttatctgttgaaggacacttggacattttcacctttttgactattgtgaataatgccgctgtagaaattggtatacaaagtatctgttgagtccctgcttacagttcttttgggtatatgcctaggagtggaattgccggatcatatggtaattctatgtctaatcgtttgaggaactgccaaacgttttcacagtggcatgcattgtgctttaacagatagtttgggaagcctttttattaccttatatttaaaatgtttactgtttcattttaaaataagaaaatgttttggaatttcataaattgttatcatttgggggtaataacatttctatatttgcctttttagtactttttaatttttccaaatttgaaatattaaatactgatttctttgacatacattcactgagaagttaaaaagatccttgcattcagcaagtgaaacatgctgtaaataaatcatgttacttctctattaacagttaacactagggactcccaagcattctgaaacttgtatgataacaaaacactagattttccttatgtcctagaaaatgcttgcatttctcaaaaagaatacactctagtttttttttttttgagacagagtcttgctctgtcgcccaggctcgagtgcagtggcacgatctccgctcactgcaagctccgcctcctgggttcacgccattctcctgcctcagcctcccgagtagctgggactacaggcgtccgccaccacgcccggttaattttttgtatttttagtagagacggtgtttcaccgtggtcttgatctcctgacctcgtgatccacccgcctcggcctcccaaagtgctgggattacagacgtgagccaccgcgcccggcccactctagtttttttctaaagttaaatctgtactgtctctagttcattatgggtaccttacttgaaaagtaaacaatattaaacaggaaaaaaatgagacagtacttaatagcagttaagcattatggagtatttactgtatgccagaccccatgctaagtaagcacattaatttaacctcacagcaatgcatactgggtgggagctctcattgtctttatttaacaagtacaaaacttgaggcacacaacagaggtttaacagagaggttaaataagttgtctatggtcacacaagtaacaagtagtagatttatatttaattcagaacatctttatctacaagcatattttaggactacatgttggcactgatgaaaataataaatagatctttatccctatcttttggagtttacagtaaagatgagcccaaaacacttaatattactgttgtaagggcatagctaaaaaatggtaattggaccttaattatagagatttgagggctacttattcccatatataagctttacttagtgtaaacttttgatatagaccccaagttcattatttgcttggtatttcaggtactggcaacccatatatgagccaatgataattagatcacctagatcttggtttaaatttattactgacaccacatccttctcgttctttattatttttgagtgcttctctacctccttgaaatgctcttgctttctggaaaaatctctttatgtaaactccttaagggcaagagtctgtgatagtgcttggtacataattagtactcaacacgtatttgctgaatagccaggtgcagtggcacgtgctggtagctgcaactaagtcaggaagctaaggtggaaggatcacctgaggtcagacatttcaggctgcagtgctgtatgatagtgatgtgaatagccactacactccagcctggacaacatgggctccgtggctaaaataagaacaaattttgataaatacatatattgtttctctttataaatctttatcaaataagatgatgaaatccaaaattgtaactgttattatggtggttgatctctgccccccaattttccacagccgtatttctatttatttatttttttggagacagtctcactctgtcacccaggctggagtgcagtggtgcaatctcggctcactgcaatctctgcatcccatgttcaagtgattctcctgcctaagcctctcgtgtagctgggattataggcacgcgccaccacgccaggctaattctttttgtatttttagtagacacggggtttcgccatgtaggccaggctggtcttgaacgcctgacctcaagtgatccacctgcttcagcctctcataatgctgggattacaagcgtgagccactgtggccggcccgccatagccatatttctaattacgttttttgtttcttgaatatacaagaagtactataactgtattaatctatgcttgcattgctataaagaaatacctgagactgggtaatttataaacaaaagaggtttaattggcttacggttctgtaggctgtacaggtagtatagtggcttctgcttctggggaggcctcaggaaatgtacaatcatggtggaaggcaaaggggagtaaggcttctggcgtggtgcaagtaagagagagggcaggagggaggtgctacatgcttttaaaggacatgttggggccaggtgcagtggctcatacctgtaatcgcagcactttgggagacagaggtgggtggatcacctgatgtcaggagtttgagaccagcctggccaacatggtgaaaccctgtctctactaaaactacaaaaattatctgggtttggtggtgggcacccgtaatcccagctacttgggagtctgaggcaggagaacggcttcaatctgggaggcagaggttgcagtgagccgagatggcaccactgcactccagcctgggagacaaagccagactccatttcaaacaaaaaataaataaataaataagataaataaataaaggacatgtcttaagcgagccctcactcactagtgtgaggagagaaccagggggatggtgctaaaccattcataaaaatccacccccatgatccagtcacctcccaccaggccccacctccaacattggggattacaattggacatgagatttgggtggggacagagttccaaacctatcaataacaatgataaacggcatgaatttttatatcagacagacctggaattgatcctggctccacttactaattttgtgtgaccttgggcaaggtacgaaacctctccaacctccagtttctcctcaggaaaatgcagctgataatagtgctatctcacaggattgctgccaggattaaagaagataataataatacatgtgatgtgctaagccatgttcaggacccattaatgtacaatgaatttttggttttttggtttcaaattagttgagattcaactgtaaaagacgtggttgaagtcctaaaggagtgtgcttattggacctacaaataggagatatgtgtataaatgactttaaaacactgacagactatatgaataagttaaaatgaataaggtagagactgaatatacatcaatgactattatttcattatagggtccaaatggtgctagaagctcaacaaaattattgtccatgtgctgttatcttatttagatatacaaacaatttaaaataaatgtatttaaattatatcataaataaaataaattacttgtgggagtgagtcataattaatgattatagtagcaatggtcctactaattttagacaaacagattgctgtgctatatgaacaactaactatgaagactaaatagataccaaattctgttataataaagtaaaacataacttgatctgaaacatttaatcatgggcttaattccaattataatgtatgatgtttaaagtataagtgataagttgttcacataagtgattattattatatataattaatattataaaccttcagcttagctttgtatttttgtttgtttgtttgtttgtttgtttttggtttttggagatggagtctcgctttgtcacccaggctggagtgcagtggtgcaatcttggctcactgcaagctctgcctcccgggttcacgccattctcctgcctcagcctcctgagtagctgggactacaggcgcccgccaacacgcctggctaattttttgtatttttagtagagacggggtttcaccgtgttagccaggatggtctcgatctcctgaccttctgatccgcccgtctcggcctcccaaagtgctgggattacaggcgtgagccaccgcgcccggccagctttgtatttttctaattatctggagaggagataggagtttactagaaaaagaagaaagttttttcatttcaatatgaagattcctacattcaagccccttttccaataggcgccactcagagatcagaataatgacacattctttggtatagatacacacactctgggtgtttaagttagcttacggcagggcaggaacttgcccgatataatagaaagaattcctttgattgagaagcggatactggttagcaaggaccttggaaaactagtagaagagatggaaatagagtaataaccgaagtcttctttaacaatgaagaaacttattttgagactccaggggttggagaaagggttttcctgggctttagaactccattgttatttggtaaaggctgggaggggagtgggctgaaagtatgaaaactgtcctttcccaaatttctcccccatcttgtctaaaatgaccaattattcaacgcttatgcagcttttagtataaactagtttagtcaactagcttttctaataactaactgagatatatcaaggtaatgagattttgaaaggcgatcaaggaaaaagcaaaatatcgttttaaagcataagttgttgatgaacacaaagctttaagtgggagctggcagcttcaggaaggaatctggcaggaagaagaccaagatagcccagagagtgatgaggattactaaaacaagagatggaaagaagaatgtagtaaaggagttgagcaagtaacaacagcaaaaaaagtgaaaagagaccaaagaaaaggaggcactgaagcatagcattgaatgaagtacatatgcaactaggagcaagcattataaaatatgagcagcagtgtgggttgtttacttagaagtaaagttgctaagtctgaatttatttttatttatttatttatttatttatttatttatttatttatttatttattttttgacgagtcccaagtatctttctccaaaacaagagggaataccagctgacttctgattctgttataggttaagctgataattatggttagaacctctaggtgtttgctatattgttagctagtaggaagaatgttggaagattggagccagtttcaattgcccatctgttctggtcttatactaggattaagtgtttactaaaaatagaacggggtaacattgccaaacgtgtagcccataggcatttgtaaacttgctctcttattaagataattcatgctttaaacactggttggccatgaattgaagatgtaaagatgaggatttaataggtagtttttttctggaatagatgatatgctttttttctgtggggaaattctaattacaacaagcataggtttaagcctctggctgataattaaagttatgctatcagtcaggtcttaccgtactgccagtacttgctgttggagagagaatagattgtaatagattctgttgttcagggtctgtgacaactgaagcctgccaaagtcagttgcgccattctctcctctttgtcatatgtaagtgaggcagcaaagtattgtgaaaaaaatatgtcaagagagctgacttatacgatgattattgctcttcttgtttgacctggggcaagcccttctgagcattttttttttaattttcaaaatgaaaataatacctattttatccaagtggaagcattattgtagagtcagacattatagtgtatgtaagcactttttaaactataaagacaacgtataaaaatgaggttttcatttctatcacctaagaattgtttctagtttaagagaggctgaaatggtcatatttctgtcatgtaggcatttctcataaatttttcaaggaatggaatgggcaggaaaggaactatgaaagtaatggaaaagaatcatgtgggtatttgcatgaaagacagacttacttgaaattctaggcacaggaatggtttctcaggattgtgataacgctgttctctgaaagatttaggtgaaaaggcaaagaccttatttatgattagatatgttttatatcaaaatatgacagtaatgaatataggagaatgaatcttatgcatctatagttactctttgaaaataacattgctggctgctatctgaatcacctgttgttcagttattttttttcccttaggaaattgtgttttgtatatttttaaattattgtaaaatgtctgcaaaattaatctgcaccacaggaaagataaaaaataaagaaaaacatctgcaaaattaagcattgattagattaaatatggacgaggtgcagaatttaaatttatttatttatttattttttgagacagagtcttgctctgttgcccaggctggagtgcagtggctcgatctcagctcactgcaagctctgcctcccaggttcacaccattctcctgcctcagcctcccgagtagctggaactacaggtacccgccaccacacccggctaattttttgtatttttagtagagacagggtttcaccacgttagccaggatgatctcaatctcctgacctcgtgatctgcctgcctcagcctcccaaagtgctggaattacaggtgtgaggcaccgtgcccggcctgcaaaatttaaatttaatacaaatttaatggactatccccaaatatatggatgtgtagaatattatatatgtttttaaaacatgagttagagaaagggttggagaaagggtttgaaaggagatgagcacaaagatgaatatctccaattcaaggtagaaaatgtacataacaattatcagtcaatacatttatttatatataatttaaaactttttttctcatagaaaaaatctgtaggttgtcctaaatatagcagtcttaatctaaataatctattgaaccaatactttctgagactttacataggcacagatcctatccgagaagctgctaatcaactgctacactgctgcaggataaaccttttatttttataattttgtgtactcaaaagcttatatcagtgaagatagatatttcttcaatctaattactattagttattttaatggaatcaatcactttgaaaagaggattcaggtgtaaaagctttattctacttttattaatgaatttaggttgctttagctgctaataatgctgttgtttgcttctttctgttgtttttttttttttgagacggagtctcgctcgtcgcccaggctggagtgcagtggcgtgatctcagctcactgcaagctccgtctcccgggttcacaccattctctggcctcaggctcccgagtagctgggactacaggtgcccgtcaccacgcctggctaattttttgtattttttgtatttttttttttttttcagtagtgacagagtttcaccgtgttagccaggatggtctcaatctcctgacctcgtgatccgcccgcctcggcctcccaaagtgctaggattacaggtgtgagccactgcgcccagcctgcttctttgtgttttatcttgcattgtattactgtggagagaagcaattcatttaaaatatctggctgatgcaaaggcataagaaggacacaatggactttggaaacttggggggaagagtgggagtggggcgagggataaaagactacaaatatggagcagtgtatactgctcgggtgatgagtgcatcaaaatctcccaaatcaccactaaagaacttactcatgtaaccaaataccacctgtacctcaataacttacagaaaactaaaataaaaaaaagaaaggcttgaactattgattctcacacacacactcacacacacacacacacacacacacacacacacacacacaaaaataaatagaatgaaatatctggctgagtgtagtggctcatgcctgtaatcccagcactttggaaggctgagacaggaggatcttttgagcccaggagtttgagaccagcctcggcaatattagtgagactgtctctacaaaaaattaaaaacaaacaaaaacttctgaataaaatatctaagcgtttttcaattcagaaaaaacttaacagtttagaaagctttgtgttaacattggtgttttttttttcaggaaacaaatgaaaacgtattttttttattctctgttgttttttgttgttgttgttgttgtttggaaacagagtctcactttgttgccctggctgtggtgcaatcttggctcactgcaaccttcacctcctgggttcaagcccagcctcagtctgattctctagcctcagcctcccaagtagctgggattacaggcacccaccaccatgctcggttaatttttgtattttaagtagagacttggtttcaccatgttggccaggctggtctcaaactcctgacctcaagtgatccacccaccatggcctcccaaattgatgggattacaggcatgagccaccgcacgcagccccattctctaccttattctatatagttttactacattttaatatttttagatataaatgtagaaattatagttttagttttaatggttcctgacatttttttttaagtttattcagagcaaatgaaaactgcttttaggccaggcatggtggcttatgcctgtaatcccagcactttgggaggctgagtgaggcggatcacctgaggtccgaagttcgagaccagcccagccaacatggtgaaaccccgtctctactaaaaatacaaaaattagctggatgtggtggtgggcagcgggcacctgtaatcccagctacttgggaggctgaggcagggagaattgcttgaacctaggaggcagaggttgcagtgagccgagatggctccactgcactccagcctggcagcctgggcaacagagacagactcgatctcaaaaaaaaaaaaaaaagaaaagaaagaaagcggctttgatgttttatattatgaaagaaatttagctggacagatccagctgttgcatttataaatagctacagatatctacagcaataaagggtttattcaggttgttatggcaactaaaattcagcagaacttcaaagataaactatattgaagcaagaggtacattaactgtacatttaatcaaattatacaataaaattgttgcttaatatatcattttagatagcaagaaattagtttaacatatcaatgtaacttactatttttaatgtacaaatattttgtttttactcttttattttttttagatggaacctggctctgtcgcccaggctagagtgcagtgccacgatcttggctcactgcaacctctgcctcccaggttcaagcgatttttctgcctcaccctcctttgtagctgggaatacaggtgcatgccacctcacctggctaattttttttttgtatttttagtagagacggggtttcactgtgttagccaggatggtctcgatcccctgaccttgtgatccgccctcctcagcctcccaaagtgctgggattacaggtgtgatgtacaaaaattttgttcctaatttatctgtatgggttttatatacttttaaggagctttacttataggaatgatggatcatgctgacccatttaaaactctctttctcggtcttctttgtaataagttgcatgcttatttagatctgctggctagggttgagggtacatttctgagtcagtggaatatataaaagcctgcattcagctttaagtccatgatcttttttttttttttttttttgagacagagtcttgctctgtcacccaggctggagtgcaatgccacgatcttggtttactgcaatctccgcctcctgggttcaagcgattctcctgccgcagcctcccaagtagctgtgattataggtgcccgccaccatgcccagctaattttttgtatttttagtagagacagggtttcgccatgttggccgggctggtctcctgacctctggtgatcacctgccttggcctcccaaagtgctgggattacaggcatgagccaccacaccaagtgctgggattacaagcatgagccactacacctggccaaaatccatgatcttataccaatgttttatccaacttaactacctggttataatcttttaagnnnnnnnnnnnnnnnnnnnnnnnnnnnnnnnnnnnnnnnnnnnnnnnnnnnnnnnnnnnnnnnnnnnnnnnnnnnnnnnnnnnnnnnnnnnnnnnnnnnnnnnnnnnnnnnnnnnnnnnnnnnnnnnnnnnnnnnnnnnnnnnnnnnnnnnnnnnnnnnnnnnnnnnatcctggctaacatggtgaaaccctgtctctactaaaaatacaaaaaattagccaggcgtggtggcgcgcgcctgtagtcccagctacttgggaggctgaggcaggagaatggcgtgaacccgggaggcggagcttgcagtgagccaagatcgtgccagtgcactccaacctgggcgacagagcgagactccatctcaaaaaaaaaaaaaaaataataataataataataattggccaggcaaggtggctcacgcctgtaaccccagcactttgggaggttgaggtgggcagatcacccgaggtcaggagttcgagaccagcttggccaacatggtgaaaccccgtgtctactaaaaatacaaaaattagccaggcgtgatggcaggtgcctgtaatctcagcttctagggaggctgaggcaggagaatcacttgaacctgggaggcagagattgcagtgagctgagatcacgccactgtactccagcctgggcaatacagtctcaatctcaaatagtaataataataatttttatttttattcaatgtaatatgtgtataatttttaaaagtgaatagtgtactgtaaagcatatactaagaacagtctcttacccttttcttcttcattctcaagtcctccttggaaacaactattttaattttcttttctttctttttctctctcttcctctcttttctctttctatacattggaaccacaatggcaaaggaagcaactatttttaattctttttgtttgtttgtttgtttttttgagatggagtttcactcttgtttcccaggctggagtgcaatgccgcgatctcgcctcaccacaacctctgcctcctaggttcaagtgattctcctgcctcagcctcccgagtagctgggattacaggcatgcaccactacgccaggctaattttgtatttttaatagagacagggtttctccatgttggtcaggctggtctcgacctcctgacctctggtgatcctcctgtcttggcctcccaaagttctgggattacaggcatgagccactgtgcctggcctatttttagttctttgtttcttctgggatttacctgtctctaaagaatgtttcatttgctgtttcttgttttttaaattatagacagtaactctttgttttttattctagaagataaagatttaacaattttatacaactcctgctaccacttactttcccccactaactcccagtataatcataccacaacttcaggcaaaataatgtttacattgtttgaattatgtatatattgtttacaactgagccactatatactgtgtttacattttcttttcttttttctttttttttgagacggagtttcactctagttgccccggctggagtgcaatggcgcaatctcagctcactgcaacctccgcctcccgggttcaagcgattctcctgcctcagtctcctgagtagctgggattacaggcatgcgccaccatgcctggctaattttgtatattcagtagagacggggtttctccatgttggtcaggctggtctcaaactcccaacctcaggtgatccgtctgcctcggcctcccaaactgctgagattacaggcgtgagccaccgtgcctggcccgtgtttacgttttctttattgtataaccttttgtttttcctggagttaataatttactatttttcatttgtttagttttctatgtacctattgtcctttattttctgaactctgcagtagaaacataaaaaccactatcagtatagttaaacatcctgggtaatcattttttataaggctttcatcttggaactttgcatctgcctgttccagtccagactgtacgtgctgtataccttctgtacagctgacattctggagctctaccatgatcctcgtggttcctgatgcttctttttcatcagagcctcagttttgtggttttcatttctttctgggtttcttttctcattttgctggtggacatcctttactagtctttttataaaagattcatggttagaaagcaggattagtgagcttaaaaaaacaaataaaagattcatggaagttaatttttttcagatatttcagttaattttgttaacctgaaatatctttattccactcctccacttgattgttagcctagttgggtacagaattacaggttaaaggccaagcgtggtgggtcatgcctataatcccaataccttgggaggccaaggcaggtgaattgcttaagacccagagtttgaggacagcctggtcaacatagtaagaccctgtctctagaagaaaaattagccaggcatggtggcccatgcctgtagtcctagctacttgggaggctaaggtaggaggatcacttgagcccaggagtttgaggctgcaatgaactctgattggatcactgcactccagcctggaaatcagagcaagacactgtctctctaaaaaaacaaaaaacaaaacgaacaacaaaaaaattgttagaaaattgttttcccacagaattttgaaggcattagtctgttgtccctcagctttcactgttgttgttgttgttgttattattattattattattattattattatttgagatggagtctcgctctgtcatccaggctgtagcgcagtggcgcagtctcggctcactgcaagcttcgcctcccaggttcacgccattctcctgcctcagcctcccgagtagctgggactacaggcacccaccaccatgcccggctgatttttgtatttttagtagagacggggtttcaccatgttagccaggatggtctcaatctcgtgaccttgtgatccgcccacctcggtctcccaaagtgctgggattacaggtgtgaaccactgcgcccagccttcagtgttattattgagaaagatgatagcattctgattcctgaacctatttgtatgtggtttactttatttttttttattttttattattattttttgagacggagtctcactctgttgcccaggctggagtgcagtggcatgatcttggctcactgcaacctctgcctctgggttcaagcaatactcctgcctcagtctcccaagtacctagaactataagcgtgtgccaccatgcctggctgatttttgtattttttgtagaggcagggtttcaccatgttggccaggctggtctcaaactcttatcctcaagtgatccacccgccttggcctcccaaagtgcttctattacaggcgtgagccaccctacctgacctgtatgtgacttactttatcttttttttttttttcgtttttttgagatggagtctcactctaatcacccaggctggagtgcagtagcacaatctcagctcactgcaacctccgcctcctgggttcaagtgattctcctgcctcagcctcccaagtagctgggattacaggcacgtgccaccacacccagctaattttttgtatttttagtagagatggggtttcactgtgttagccaggatggtcttgatttcctgaccttgtaatcgtccaccttggtctcccaaaatgctaggattacaggcgtgagccactgcagacttaaaactttatcttaaagcttttagactcttctctttagccagcattttgggaactgagtaagggaatacacttgtttatatgtaacttttcacatagtattcttaattttagtaaggtgatttacttcagtctctcagtatataccttgtgtctttgaatattctgtttcaattaatcagaaaatgaacattttctctcctgccatgtgagggaggtgcacttgtttggttgcatgggagtttagaagaaaactatcttaggtatttcttctgtataatttcaatgaattgcaacgtttccaacacttctccttatacctgctgtctgagatagctagtatctccagttccttagattcctggagttctttgatgagaaccagctagattcttgatgtcatccccctattggacagtttggactcagctttctctgttctggtatgttaaggttgctactccttcattccctttcttgctttcaaatatttgttaatcttttttgtctactatcatttcttccatgtctttctgttattttaatttcacatttcaggaggtttctgagataaatacatgtgtgcagtctgctattttgaatcagaagtcctgaaagtccaacattattgccagtgcttttattgtttctgtgataggcactgtgttccaaggcagctcatttcctctttggtaagcactgttttttagtggctgcttatcttgggtgaaagtctttgtctctgtaggactattgatcctaattctacaccttagagtattccaaataaatctgttgtcttccacttggtaacctttcatagacttaaagacagtattagaactttagtattttttcttctctagcgtagagataacctagtttctctatttgatcctcagaaaatactgtttcaaatttcttcactatcctggtcactcacttctgaattaactgttcttaaagaatgatacctggaattgagagcaatactccaggtagaatctaaccagcacagactagagtaaattattatcattttcttttgaaatattgttgtgataaaaaaaaataaacctagcactcctggtatgttctgcaaagggaagagtttctcagaattttatctgcttgaaattaaagaaaaaatgtaaagcttctactacttctatatatagagagagagacctgaaacatacaatgattttgttttgtttttaattagatcaattggtgctcctttttaaaaataatctggagtgtaggttgagaattaagatgttctgcataataacgtaacatgaaattttaaactttaattttgaaatatttttagagtcatgtagaagttgcaaaaatagtacagagttcagatgtactcttcacccagcttcccccaaagacatcttatataaccatagtataattatcaaaatcagaaaactgacattggtacaatactatttattaactaaactactgaccttatttggatttcaccaggtttttgtttgtttgtttgttttttgagatggagcctcgctctgttaccaggctggagtgcagtggtgtggtcttagctcactgcaccctcgcctcctgggaacaagcgattctccttcctcagccatctgagcagctgggatcacaggcatgcatcactactcctggctatggctaatttttgtatttttttcttttagtagagacggggtttcaccatgttggtcaggctgatcttgaactcccagcctcaagtgattcacctgcctcagcctcacaagatttcacagttattatatacaatccttaaaaaaaaatgtttgggggatgtatgtagttctacaggattttatcacatgtataaattcatatgaccattatcacatttgggatatagaactcccaaagaaactcccatgtgctagccgtttacagtcacaccccaatcctaacccctggcaaccactgatctgttttccattaccatacttttgttactttgagactgttatgtaagtggaatcatctagtatgtgaccttttgaaacccaatagtttttcaacagttacctcaccgcacccccacagaagtctttagtttctattgttgccgtttttatgtccatgagtaccccatgtttagctcccacttataagtgagaacatgtggtatttggctttctgttcttgcattaattcacttaggataaaggcctccagttgcacccgtgttgctgcaaaggacatgattttgttctttttttatggctggatagtattctgtggtgtatatgcaccacattttctttatccagaccacatctgatgggcatctaggttgattccacatctttgctattgtgaatagtgctgcagtgaacatgcgagtgcatatgtctttttgatagaattacttgttttcttttgggtatatacccagtatgggtaatcggattcctgggtcaaatggtagttctgttttaagttctttgagaaatcttcaaactgctttccatagtggctaagctaatttgcattctcaccaacagtgtataagtgttcccttttctccacagcctttccgacatctgttgttttttgactttataataatagccattctgacatctgactgatgtgagatggcatctcattgtgattttgatttgcatttctctgatgattagtgatgtggagcattttttcgtgttcattggccagatgtatgtcttcttttgcgaagtgtctgtgcatgtctttcgcccatttggaagtgttttgtggttcttgtagagatatttcccctctttgcttagatgtagggttttttgtttgtttgtttatttgttttatttttattttttggtggggtgtggggtatggctattgtaaatgggattgcattgttgacttgtttgcccactttttaattggactgcttacttatttacagttgaggttagggatttccttattgattctagatataaattatttctcaaatatatgtgatttgcaaatattttctcccaatctgtggcttcttttctcattttcttaatatctttcacagaggaaaagttttaattatgatgaagtctaatttattaattttttcctttatgggttgtacttttggtgtcatatctaagaacattttccctaaatttaggtcacacagagtttctcttgttttttccctaagagtcttatagttcaacatctgataaaattatgcatttgaagtttgttaattttggtataaattgtgaggtttaggtcaaggtccattttgtctcctacaggagaccagttgtcccatcaccacttgttaaaacgactatccttgcttcattaaattgcttttatgcctttgtcaaaaattggttgtctgtacaagtgtgagtttatttttttgctcttttttgttctattgatctgtgtgtctgtctcccaatacgaccgtttaactgttgtgcctctatagtaagtctttaaaaagctaatgtgattacccttattttattctttttttcaaaattcttttagctattctagttcctttgcctttccatataaattttagaatcagcttgttcatgtataaaaatctgttaggatttttataggaattgcattaaaccaactgcagatcaatttcgagagaattgatgtctttactctctaaagcctccgaatccatgagaatgccacatctctccagttatttaggtcattaaaacctttttttggcctggtgcagtgactcatgcctataatcccagcactttgagagactgaggtgggaggatcacttgagcacaggagttcgagaccagcctcagcaacatagtgagacctcatctctacaaaaaatagaaaaattcgccaaccatggtggcacgtgcctgtagtcccagctactggggaggctaaggcgaggtgattgattgagtctgggaggtcaagggtatagtaagccacaatcatttgtgccactgcacttcagcctcggtgacagagcaagaccctgtctcaaataaagtaaaataaaattcatcagtgttttgtagtttttggcacacagatcctgtgcatgttttgttatatttctacccgaattttaatttttttttagtgttattgtaaatgttctgggaaattttattacctgtcatattgttgggccttcccactgtagctttatattttattaaaacatatatttttgactgagttcagtggctcgcacctgtaatcccagcatttaggaggttgaggtaggaggattgcttgagcccaggagttcaagactagctcaggcaatatagtgagacctctatctctacaaaaaatttttaaaaattaggcaatatagtgagacctctatctctacaaaaaattttaaaaaattagccgtgcatggtggtgcatgcctgcagtcccagctactcaggaggctgaggcaggaggattgcttgagcccaggattttgaggctgcagtgagctatgatcatgccactgcactccagcctgggtgacagaacaagaccccgtctcaaacaaaaaaacaaaacaaaaacaaatggggcgctcgcttcagcagcacatatactaaaaatgatagagaagattagtatggtccctgcacaaggatcacactcaaatgttacatattataatttaaaaaaaatggggaaactgagacttagaacagtcaagtaattaattgcctaaggttacaaaattggtaaacagtagagctaggattcaaacccaggtgtggctttagaatctctaacatgatgctaaccactatacaatgctgcccagagcaaaaccatcctgatatactctaacagcaactgttttttaagttttgggtatatattgttgctcaaaagtgacaagactactaactttatcttttgtgttacccagattaaaattctttcaggaaaaaatgaactatatataatattaagattaatgtatttcatcatctgccttcttcttatctaaatcaaagaattcccagggggcctggcatggtggctcacacctgcactttgggaggccaaggtatgaggatttaatgagcccaggagttcaagaccagcctgggcgacagagtaagatcctgtctttacaaaaaaaaaattttttttttcttgagacggagtcttgctctgtcgcccaggctgggagtgcagtggtgcaatcttggctcactgcaacctctgccgcccaggttcaagcgattcttttgcctcagcctcctgagtagctgggattacaggcacatgccaccacacccagctagtttttgtatttttagtagagacggggtttcaccatattggtcaggctggtctcgagctcctgaccttgtgatctgcctgcctcggcctcctaaagtgccaggattattggccgggcgcggtggactttcaagttcatatggaatcaaaaaagagcctgcattgccaagacaatcctaagccaaaagaacaaagctggaggcatcatgctacctgacttcaaactatactacaaggctacagtaaccaaaacagcatggtactggtaccaaaacagagatacagaccaatggaacagaatagagccctcagaaataataccacacatctataaccatctgatcactgacaaatctgacaaaaacaagaaatggggaaaggattccctatttaataaatggtgctgggaaaactggctagccatatgtagaaagctgaaactggatcccttccttacaccttatacaaaaatgaattcaagatggattaaagacttaaatgttagacctaaaatcataaaaagcctagaagaaaatctaggcaataccattcaggccataggcatgggcaaggacttcatgactaaaacaccaaaagcaatggcaacaaaagccaaaattgaaaaatgggatctaattaaactaaagagcttctgcacagcaaaagaaactaccatcagagtgaacaggcaacctacagaatggggagaaaattttttacaatctacccannnnnnnnnnnnnnnnnnnncatattataatttaaaaaaaatggggaaactgagacttagaacagtcaagtaattaattgcctaaggttacaaaattggtaaccagtagagctaggattcaaacccaggtgtggctttagaatctctaacatgatgctaaccactatacaatgctgcccagagcaaaaccatcctgatatactctaacagcaactgttttttaagttttgggtatatattgttgctcaaaagtgacaagactactaactttatcttttgtgttacccagattaaaattctttcaggaaaaaatgaactatatataatattaagattaatgtatttcatcatctgccttcttcttatctaaatcaaagaattcccagggggcctggcatggtggctcacacctgcactttgggaggccaaggtatgaggatttaatgagcccaggagttcaagaccagcctgggcgacagagcgaaactccgtctcaaaaaaaaaaaaaaaaaaaagtgccaggattacaaggcgtgagccaccgtgcccagccacaaaaaatttaagatcaactgggtttgttggcgcatgcctgtagtcttagctactccagaggctgagatgggaggatcacttgagcccaggagcccaggagttggaggttacagtgggccatgatggtcccactgcactccagcctgggtaacagagtaaaaccctgtctcttaaaaaaattaaaaaaaaaaaaaaaaaaaaaaagaattcccaggatatacaactgtcagagaatgagaataacacacacacatacacacacacacacacacacacacacactaaatctctcattatccttaatagttacaaattgatttcatttttatttaagattactcagaaaaatttattggacttttaatttatgttaagaaattgttttaaaaggccatcagaaattctattaaaatcatgaggcttttttttttttttttaagacagagtctcacacagtcacctagactagagtgcagtggtgcaatctctgctcactgcaacctctgcctcccaggtacaagtgattctcctgcctcagcctcctgagtagctgggattacaggtgcccaccaccactcccggccattttttgtatttttagtagagacagggtttcaccgtgtcagccaggatggtctcgatctcctgacctcaggtgatccacccgcctcggcctcctggaatgttgggattacaggcatgagccaccacaaccagcccatgaggtttttataaattatatgtgctacgcatttgctaatttagacaatgtagtgtgctgtttataaaagttggcagcatttgagaagttaatcttgactctgtctcatgtccagccagggctgttagactgtcccagagaaggtgatgatcactgacaataacgtgttgataaatctttgaagcctttcaattaagaaagtcctctggaatgtaaacatagatgttatacctgtcacaaaaactaacttaaaatagatcatacacataaatgtaaaatgcataacttataagacttctagaagataacataggagaaatctagtgaccttgagtttggccatgagttttagatacaactcaaatagcatggaggaaaaacattgataaaattgactttaaacttgtgttctgggaaagacacagtaaagggagttaaaaggtaagtcacaaactgggaaaaaatctttgcaaaacacatatctgataaaggacttgtacccaaaatatacaaaaaacacttacaattcaacaataagaaagtgaacaacccaattaaaaagggagcaaaagatctgaacagacacctcaataaagaaaatgtagagacagcaaataaacactaaaaagacgctcatcatttgtctttagggaattgcaggttaaaacaatgagataccattaaagtctgttagaatggctaaatttaaaaactgaaaaactggtgaggatgaaaaacaaaagaaactctcatctttgctggtggaaatgcaaaatgatatagccactttggaaaagagtttggcagtggcttacaagaaagataaacatattcttaccatatgatctagcaattaatcgcatttctaggtgcaatagacatacccagttgagttgtaaacttacgtccacacagaaacctgcaaaggaatgtttacagcagctttattcataactgcccccaaactggatgcaacagattgtcccttgataggcgaatggataaccaaactattgtgatacattcatacaatggaatgttattaagcgatcaaaagaaaggagatattaaaccaggaaaagacatggagaaaatatagatgcatattattaagtaattgaaaaacctatatactgtaacaattccaattatataacattctggaggaggaaaattatggtggcagtaaaaagatcagtggttgtcgggttgtggacagtagtgagggagggatgaataggtgaagcagagtggtattttagggtggtgaaactattctgtacgcactgtaatggtgggtacatgacattatgcatttgttaaagtctgtagaactttacagcacaaaaagttaacctcagtgtgtacaaatttaacaatagctttcacaggtaggcatggtggcttctgcctgtaatcccagctacttgggaggctgaggtaagaagatcactggaggccaagagttcaagtccagcttgggacttgagttcaagtccagcaacatggcaagaccttgtctctaaaaaaaaaaatttttttaaggaaaaaataatataattcaggaggccacgggatttgggaaagaaagcagactgtgacaagagcatctaactgtattacaaatatatgaaacaacctcaccgaagggatggggagaaaagtgctaccctaactttgaaaatgactggagtctgtaaaactaaaggccaaaggaactgtacaagagtacttactcaagttgataaagtttttctgcatgggtttataggttaataaatgcattgttgctatacttgtatactaacattgaacaataagaaaatagatagcagatagtgggagccaggtttctcactgttggagtggaaattttatgtacactaacattgaacaagaagaaaatagatagcagatagtgggagccaggtttttcactgttggagtgaaaattttacaaatcaacaagggaggaagctagaatgacccatgtggtaatggattaacgttgaggatactagaacagctcatatatagttagatagttgcttgtggaaatttttatagatgggtatgtgcacaagttagtatacatactataaagtttagaagtttacaacaccaccaccacttctgactccaattgtaagtttaggggtccccaagatcaccctcatgttgaataattccctagaggtactcacagaactcactgaaagctgctatatttacagttatggtttattacaataaaaggatacatattaaaaccagccaagggaagaagcacatgggacagagtacaggagaattcctcatgtgaagcttccagtttcttctcctgctggactaatggacagtggtaacttcccccagcaacaatttgtgacgacacgctagaagtattgccaaccaggtaagatcactcaagccttggtgtccagagtttttgttggggcttggtcatatagacatgattgactactcacatggctgttttttgttacagataccacatggctcaaaacctccaccattaattacattgttagcataggctatctggcatggcctaaagctcccaggttaacaaggacctacttttcagtcaggcattacagaggcttagagaatacctccctggagccaagggcaaaagccagaccaattcagtagtaacaagtatacctaatgctcagatcttggtttctaatattattcttcagtaagagtaaccaggactccttggagaaatggctgattccagggatagggtagaaaatgtacagaaccagcctggggcatcttgtagaggcagaaagtaagaaagtgctaaagaaaaaaaaaagatcactgtgagaggtatgtaaaagaagccaaatgaaagagcacccaatgggaaaatttagaaatatttgagcaaaataaatgaatgaataccatactattgtattataacctaaagtataacataaatattcatgattgtggtgggttgcagctgatctgggccagcgtcatcagtggtaaaataatttgctgaaacagctgtgagttaataattgtaataataagtaagtgtattagagagaaagtatgttgcaaggaagcattgggcagcacagcagagaaaaagctgtctgcaaaggggcagggctggagggaagttttataggatggacctggagggactacatgtagaacaaggtattcgggaacaggatattgtgcaaacgggatgtttgtagttagctgtttctcagaacaattgttctcactcaccctggggcaccccccttgttgttgctaacttatcaggactccacaatgagttcatactgatatataaataattggataaattaataaatggaagtgaatagacaaatctttccatatggaataatgctaattatattatctagatacttcatcctgaggatgggaggttaattctccactccttaagtgtgggctgtgcatagtgacttccttccagagtcccttatgaaaagtggagagtgggaggaaaggaataacttcatgggagagacgtgacaaacacaccttcaagccaagtgattatggtcaatataaacagtcataaatcatgttgatatcatatataccctcaatatgctatgatgaaaaatggcactttatctctgtgatctttgtcacaaaagtctgtaacaccaatctaaccatgagaaaaacaaatactttttttttttttttttgaggcggagtcttgctctgtctcccagactggagtgcagtgcagtggtgcaatcttgactcactgcagcctccacctcccaggttcaagcaattctcctgcctcagcctcccgagtagctgggattacaggtgcacaccaccatgaccagctaatttttgtgggtttttttgtttgtttttcatttcgagacagagtcttactctgttgcccaggctggagtgcagtggcatgacctcggctcactgcaacctctgcctcttgggttcaagcgattctcctgcctcagcctcctgagtagctaggactacaggtgtgcaccaccacgcctggctaatttttgtattttttagtaaagatgggatttcaccatattgcccaggctggtcttgaactcctgacctcgtgatccgccctccttggcctcccaaagtgctgagattataggcatgagctgctgtgcctggccaatttttgtatttttaatagaaacggggtttccctgtgttgggtaggctggtctcaaactcctgaccttaagtgatccacccaccttggcctcccaaagtactgggactacaggcatgggagccacagtgcccagcctgagaaaaacaaattctaatagagggccatcctgtagtatacctgaccagaactctttaaactgtcaagatcctcaaaaagagaaagtctgagaaacaatcacagctaagagacacctaaggagacgcgacaagtaaacgtaatatagtggcatcctgaatgggatcctggaacagaaaaaggacattaagtaaaaactaaggaaatcaaactatggaccagttaataataacttttcagtattcattcattaactgtaataagtgagccatactaacataagctgttaataataggggaaaatggaaaatgtgtgtgtatgttggggggtatatgaaaatgctacactatctactcaatttgtaaatcaaaaactgttggctgggcgcagtggctcatgcctgtaatcccagcacttcgggaggccaaggcgggtggatcacttgaggtcaagagtttgagaacagcctgatcaacatggtgaaaccttgtctctactaaaaatacaaaattagccaggtgtggtggtgcacacctgtaatcccagcactttgggaggccaaggcgggtggatcacttgaggtcaagagtttgagaacagcctgatcaacatggtgaaaccttgtctctactaaaaatacaaaattagccaggtgtggtggtgcacacctgtaatcccagctactcgggaggatgaggcagaagaatctcttgaacctgggaggtggaggttgcagtgagccaagatcgtgccattgcactccagcctgggcaacaagagcaacatctctgtctcaaaaaaaaaagtttagaatgttttgattttaaaaagaattataattttaaaaagtgtagaacaggccgggcgctgggtggctcatgcctgtaatcctagcactttgggataccgaggcaggcagatcacgaggtcaggagatctagaccatcctggctacatggcgaaaccttgtctctactaaaaatacaaaaaaaattagtcgggcatggtggcggcgcctgtagtcccaggctggagaatggagtgaacctgggaggcagagaacctgggaggcgtgaacctgggaggcaggagaatggcatgaacctgagaggcggagttttcagtgagccgtgattgcaccacggcactccagcctgggcgacagagtgagactccctctcaaaaaaaaaaaaaaatgaattaaataaaaattaaaataaaaaactagctgggcgtggtggtgcacatctgtagtcccagctatacttggaaggctgaggcaggagaattgcttgaacccgggaggtagaggttgcagtgagcggagatcgcgccacttagcctgggtgacagagcaagatcctgtctaaaaaaaataaaaataaaactgtagaacaaggccgggcacagtggctcacacctgtaatcctagcactttgggaggccgaggcaagcggattgcttgcgcccaggaatttgagacaagcctgggcaacatggtgaaaccctgtgtctaaaatatatatgtatgcaaaaattagctgggcatggtggtgtgtgcccagagtcacaactgctcaggaggctgagatgggaggatcaactgagccctggaggttgagggtgcactgagccatgaccatgccaatgcactccagcctgggcacagagctagaccctgtctcaaaacaaaacaaaacaaaacattgtgaaacaatgaagattgtaggggaaatggcatatgaaaaagtgatttattataaatgggatcccctaagcatacaatgtaaacaaatatctgaccttcaaaggagggtgcagagtatgctttgcaagtctttaggcagagcattatagttttgtcacatacctttctatacgtcatatggagttaaatacagagatacattattttgggaattaaattcttaagaattatagtactattttttgagaaatgtatttcaactgtcattttactgaaggactgtaggtcctgggatattagagaatttcacttattacaaagattaaaagcaaacatgattaatatttacaaatatattgaattattatctgaatttattgtgaagattttctaatatgatgagttgattttaaaagttaccaatgtttctggtataaaaaaaattataactaattgtaatttatatttcaaatgggtatgaaagtgaataataagggtaacaataaaaggaagaaaataaaattataataaaaatgagaacataatgcttacagattaaaaagtgatataaagggataacttttcagaagagattaaaaactatctagaataatataatatacattgtatgactgctggattttatgagtacatcctccagcctcttattgagtttgtaaagaaatagtgactgtttccctcattaatggcaagtgtaaatagccgaggtgggcattcaaagacagtttaccatctccccacatggggcttttgaaggttgtcactaaactaattatttccatgaaaatgtgttaatggaatttatttcactgttgagtcttctacttagagtcttttatagaggcaacatattttataaaactgcatggaaaaagatatcagcaatcaatctttagagtagtagacttttgcaaaaacatgatttctcttgtatttgtaccctaataagaaatctagcagtcttctagcaaagaacatcacaacatcttacagaaaatttggtttgaactaagagactaaagagacatagagaccaaatttttaaagttaaaatatttctatcaataaccttttattcaagcattattgagtgttgttttcattagataatggcactggcttctcatatatattgcatatagtattgcagtctgggaatggcatagtcactttcctccattatggtaagctttgcctgtgtctgaatgcccagccttaacagtgttgctaatcacttatgcgaaatgtgtgaccaagtctacatttgctggaaatttctgacattgtaaatatttgggtatattgttgtaatcatcattaattagtattttcaggaaggaaccaggggtaacatatagcaacctagcaagtggatttacttttacagattcattcctctacagttctgttcatgggtcatggttggttttttttttttttcagtttcttttattgtggtaaaatacacataacgaaatgttctgtcttacccatttttaagtatacaatttattggtattaagtatattaatattattgtacaactatcaccaccatccatctccagaactcttttcattttgcaaaattgaaactttctatccattaaacagtaacttctcattccttcctcctcttagcccctggcaaccatcattctgctttttgactatgatttggactacaatgaataactaatttaagtggaatcatacagtatttatctttttgtgaccaatttatttcagttaacatgatgtcctcatcaaggttcactcatattgcagcatatattagaatttatttatttttgtttgtttgtttttgagacagagtctcgctctgtcgctaggctggagtgcagtggcgcgatcttggctcactgcaacctcctcctcccacgttcaagagattctgctgcctcagcctcccaagtagctgggactacaggcgtgcgccatcacacccagctaatttttgtatttttagtagagatggagtgtcaccatgttggccagcctggtctcgaactcctgacctcaggtgatctgccgaactcggcctcccaaaatgttggtattatacgcatgagccaccgtgcccagccaaaatttatttcctttttaaggctgaataatattctgttgtatatatgtaccacattttgcttatccattcatcagtcagttgatacctgggttgcttccatgttttagctactgtgaataatgctgctatgattacaaatgttatgattataaatgtataagtatctctttgggacccaattcttttgagtatatacccatagaattgctgggtcatttggtaattctattttaaactctttgaggaaaccgttttccacagtggttgtactattttacattttctttcttttttattattattatactttaaattctagggtacatgtgcacaacatgcaggtttgttacatatgtatatgtgtgccatgttggtgtgctgcacccattaactcgtcatttagcattaggtatatctcctaatgctatccctccccgtttcccccatcctatgacagactctggtgtatgatggtccccaccctgtgttcaagtattctcattgttcaattcccacgtatgagtgagaacatgtggtgtttggttttctgtccttgcaatagtttgctcagaatgatggtttccagcttcatccatgtctctacaaaggacatgaatgcatccttttttatggctgcatagtattccatggtgtatatgtgccacgttttcttaatccagtctaccattgatgggcatttgggttggttccaagtctttgctattgtgaatagtgccacaataaacatacgtgtgcatgtgtctttatagcagcatgatttataatcctttgggtatatgcccagtaatggaattgctgggtcagatggtatttctagttctagatccttgaggaatcatcacaatgtcttccacaatggttgaactagtttacctcccaccaacagtgtaaaagtgttcctatttctccacatcctctccagcacctgttgtttcctgactttttaatgatcgccattctaactggtgtgagatggtatctcattgtggttttgatttgcatttctctgatgaccagtgatgttgagcattttttcatgtgtcttttggctgcataaatgtctttttttgagaagtgtctgttcatatcctttgcccactttttgatggggttgtttgattttttcttgtaaatttatttaagttctttgtagattctggatattagccctttgtcaggtgggtagattgtaaaaattttctcccattctgtaggttgcctgttcactctgatggtagtttcttttgctgtgcagaagctctttagtttaattagatcccatttttcaattttggcttttgttgccattgcttttggtgttttagtcatgaagtccttgcccatgcctatggcctgaatggtattgcctagattttcttctaggctttttatgattttaggtctaacatttaagtctttaatccatcttgaattcatttttgtataaggtgtaaggaagggatccagtttcagctttctacatatggctagccagttttcccagcaccatttattaaatagggaatcctttccccatttcttgtttttgtcagatttgtcagtgatcagatggttatagatgtgtggtattatttctgagggctctattctgttccattggtctgtatctctgttttggtaccagtaccatgctgttttggttactgtagccttgtagtatagtttgaagtcaggtagcatgatgcctccagctttgttcttttggcttaggattgtcttggcaatgcaggctcttttttgattccatatgaacttgaaagtagttttttccaatactgtgaagaaagtcattggtagtttaatggggatggcattgaatctataaattaccttgggctatatggccattttcacaatattgattcttcctgtccatgagcatggaatgttcttccatttgtttgtgtcctctcttatttcattgagcagtggtttgtagttctccttgaagaggtccttcacatcccttgtaattggatttccaggttttttattctctttgaagcaatcgtgaatgggagttcactcatgatttggctctctgtttgtctgttattggtgtataggaatgcttgttgtgatttttgcacattgattttgtatcctgagactttgctgaagttgcatatcagcttaaggagatttggggctgagacggtggggttttctaaatatacaatcatgtcatctgcaaacagggacaatttgacttcctcttttcctaattgaatacgctttatttccttctcctgcctgattaccctggccagaacttctaacactatgttgaataggagtggtgagagagggcatccctgtcttgtgccggctttcaaagggaattcctccagtttttgcccattagtatgatattggctgtgggtttgtcataaatagctcttattatttttagatacatcccatcaatacctagtttattgagagtttttagcatgaagggctgttgaattttgttgaaggctttttctgcatctattgagataatcatgtggtttttgtctttggttctgtttatgtgatggattatgtttattgatttgctcatgttgaaccagccttgcatcccatggacaaagccaacttaatcatggtggataagctttttgatgtgctgctggattcggtttgccagtattttattgaggatttttgcattgatgttcatcagggatattggtctaaaattctcttcttttgttgtgtctctgccaggctttgctatcaggacgatgttggcctcataaaatgaattagggaggattccctctttttctattgattggaatagtttcagaaggaatggtaccagctcctctttgtagctctggtagaattcagctgtgaatccatctggtcctggactttttttggttggtaggctattaattattgcctcaatttcagaacctgttattggtctattcagagattcaacttcttcctggtttagtcttgggagggtgtatgtgtccaggaatttatccatttcttctagattttctactttatttgtgtagaggtgtttatagtattctctgatggtagtttgtatttctgtgggattggtggtgatatcccctttattattttttattgcatctatttgattcttctctcttttcttcattagtcttgctagcagtctatcaattttgttgatcttttcaaaaaaccagctcctggattcatcgatttttttgaagggtgttttgtgtctctatctccttcaattctgctctgatcttagttatttcttgccttctgctagcttttgaatgtgtttgctcttgcttctctagttcttttaattgtgatgttagggtgtcaattttagatctttcctgctttctcttgtgggcatttagtgctataaatttccctctatacactgctttaaatgtgtcccagagattctggtatgttgtgtgtttgttctcattggtttcaaagaacacctttatttctgccttcatttcattatgtacccagtagtcattcaggatcaggttgttcagtttccatgtagttgagcggttttcagtgagtttcttaatcctgagttctagtttgattgcattgtggtctgagagacagtttgttataatttctcttcttttacatttgctgaggagtgctttacttccaactatgtggtcaattttggaataagtgtgatgtggtgctgagaacaatgtatattctgttgatttggggtggagagttctgcagatgtctattaggtctgcagatgtctattaggtgcagagctgagttcaattcctggatatccttgttaatttcctgtcttgttgatctgtctaatgttgacagtggggtgttaaagtctctcattattgtgtgggagtctaagtctctttgtaggtctctaagaacttgctttatgaatctgggtgcttctgtattgggtgcatatatatttaggatagttagctcttcttgttgaattgatccctttaccattatgtaatggccttctttgtctcttttgatctttgttggtttaaagtctgttatatcagagactaggattgcaacccctgcttttttttttccatttgcttggtagatcttcctccatccctttattttgagcctatgtgtgtctctgcatgtgagatgggtctcctgaatacagcacactgatgggtcttgactctttatccaatttggcagtctgtgtcttttaattggagcatttagcccatttacatttaaggttaatattgttatgtgtgaatttgatcctgtcattatgatattagctggttattttgctggttagttgatgcagtttcttcctcgcatcgatggtctttacaatttggcatgtttttgcagtggctggtactggttgttcccttccaagtttagtgcttccttcaggagctcttgtaaggcaggcctggtggtgacaaaatctctcagcatttgtttgtctgtaaaggattttatttctccttcacttatgaagcttagtttggctggatatgaaattctgggttgaaaattcttttctgtaagaatgttgaatattggcccccactctcttctggcttgtagagtttctgccaagagatccgctattagtctgatgggcttccctttgtgagtaacccaacctttctctctggctgcccttaacattttttccttcatttcaactttggtgaatctgacaattatgtgtcttggagttgctcttctcaaggagtatctttgtgatgttctctgtatttcctgaatttgaatgttggcctgccttgctacgttggggaagttctcctggataatatcctgaagagtgttttccaacttggttccattctccccgtcactttcaggtacaccagtcagacagagatttggtcttttcacgtagtcccatatttcttggaggctttgttcatttctttttacttttttctctaaacttctcttctggcttcatttcattcatttgatcttcagtcactgataccctttcttccacttgatcaaatcggctaccgaagcttgtgcatgcatcacgtagttctcgtgccatggttttcagctccatcaggtcatttaagggcttctctacaatgtttattctagttagccgttcatctaatcttttttcaaggtttttagcttcctggagatgggttcgaacaccctcctgtagctcggagaagtttgttattaccgatcgtctgaagccttctctcaactcatcaaagtcattctccgtccagctttgttctgttgctgacgaggagctgtgttcctttggaggagaagaggcactctgatttttagaattttcagcttttctgctctggtttgtccccatctttgtggttttttctacctttggtctttgatgatggtgatgtacagatggggttttggtgtagatgtcctttgtgtttgttagttttccttctaacagtcaggaccctcagctgcaggtctgttggagtttgctggaggtccactccagacactgtttgcctgggtatcaccagcagatgctgcagaacagcaaatattgcagaatggcagatattgctgcctgatccttcctctggaagtttcgtctcagaggggcacctggctgtatgagatgtcagttggcccctactgggagatgtctcccagttaggctactcctgggtcagggacccacttgaggaggcaatatgtcctttctcagatctcaaattccatgctgggagaaccactactctcttcaaagctgtcagacagggatgtttaagtctccgaagtttctgctgccttttgttcagctatgccctgctcccagaggtggagtctacagaggcaggcaggcctccttcggctgcggtgggctccacccagttcaagcttcccagccactttgtttacctactcaagcctcagcaatggtggttgccccttcctcagcctagctgctgccttgcagttcgatctcagactgctgtgccagcagtgaacgagactctgtgggtgtgggaccctccaagccaggcatgggatataatctcctggtgtgctgtttgctaaggccattggaaaagtgcagtattagggtgggagtgacctgattttccaggtaccgtctgtcacggcttccctttgctaggaaagggaattcctcgaccccttgcgcttcccgggtgaagcactgccccaccctgctccgtgggctgcacccactgtctgacaagccccagtgagatgaacccagtacctcagttggaaatgcagaaatcacccgtcttctgtgttgctcatgctgggagctgcagactggagctgttcttatttggccatcttggaacccttattttacattttcaacagtgcacagggttctgatttctccacatccttatcaatgattgttgttttctgtttttctgatggtagccatcctaattagtatgtacctcattataattttgatttgtgttttcctaatgattagtgatactgaacttttttttttaaatgtgctttatgaccatttatgtatcttctttttttgtttttttttgtttttttttttgagatggagtctcactctgtcaccaggctggagtgcagtggcgtgatctcggctcactgcaacttccacctcctgggttcaagtgattctcctggctcggcctcccgagtagctgggactacaggtgcacaccaccacatccagctaatttttatatttttattagagacggggtttcaccgtgttggccaggatggtctcgatctcttgacctcgtgattcgcctaccttggccttccaaagtgctgggattacaggtgtgagccaccacgcctggtctaccatttgtatatcttctttggagaaatgtctattcaagtcatttgcccactttttaattgggtggtttggtttttatattgttgagttctgtattaactccttgtcagatatatgatttgcaaatatgttctctcattctgtgggttgtctttctactctgttgatagtgtcttttgatgcacaacatttttaaattttcataaagtccagtttgtctattttgttgttgttgcctgtatctttgatgtcatatctaagaaagcattgctacatctaaggttgtgctttcttctttcttgccttatgttttttaaaataataattttatagtattaggtcttatatttaggtcatggagccatttggggttaattttagtatatagtatgaggtaaggtccaatttcattcttttgcttgtggatatccagtttttccagatccatttgttgaaaaggctgtatttttctccactggatggtcttgacacccttgtcaaaaatcactttaccatatatgcaaggatgcatttctggactccctattgtatttagttgttctacatatgtgtctgtctttatgtcagtactattctgccttgattactgtagctttgtagtaacttttgaaatcagaaagtgtggctgggcttggtggctcatgcctgtaatcccagcactgtgggaggctgggatgggtggatcacctgaggtcagaggtttaagaccagcctggccaacatggtgaaatgccatctctactgaaaatacaaaaattagttgggtatgatggcacacgtctgtaatcccagctattcctcaggagactgaggcatgagaatcgcttgaacccgggagacagaggttgcagtgagccgaaattgcaccactgcactccagcctggacgacagagtgagactctgtcccaaaaaaagaaaagaaagtgtgaagtgtgaatcctccagcattgtttttccttttcaggattattttggctatttggagtcccttgaaattccatataaatattaggatgagtttgtctttttctacaaaaaccgttatttggatattgatagagattgcattaaatcagaggatcactgaataatattgacatctgaacaatattaaccccttcagttcatgaacatggaatgtctttttttaatgtcctctttaatttctttcaaaaatatttagtggttttcattgtattgcttctttggttcatacctaagtattttattctttttggtgctactataaatagaattgttttcttaatttccttgtcagattgttcacatttagtgaatagatgcaactgatttttgtgtgttgactttgtatcctgccattttgatgaatttattagttctaataggtgtgtgtgtatgtgtgtgtttgtaatctttagggttttctacatataggatcacgttatctgtaaagagataattttactttttccttgccaatttggatggcttttacttctttttcttgcctaatttctctgactagtacttctagcactctgtagaatagaagtagacaagcaggcaaccttgccttgttcctgatcttagaggaaaagcttttcgtcttttcatcattgaatatagtgctttttgtgggtttttcatatatgacttttattacagtgaggtagtttccttctattcttagtttttttagtgtttttatcattaaagtttttttgaattttgtcaaacatcaattgagatgatcatgtgggttttttccttcattttgttaatgtggtatattacattgtttgatttttcatgtgttgaggcatccttacagttccggaataaatcccattcagtcatggtgtataattattttaatatgctgctgaattctgtttctagtattttgtctcatggtcatgattttcaaccaagtgagataaattatttaaaatgataaaacttgaggtcacagggcaaactgctgctcccaaaattggagatactgacaggtgaaaatagagaatcacagcttagtagagcagaaacccacaagtagcaacctctgcaggtaccagtatcagagtagggaaatctgaattgtaattgatgtattcctggaaactcaagtgtggacaactctgagagttaacccagtcatatgggtgccccgacacttttgtgagttttacctccaagagctctatcaaattctcacagtgaatatgcgagaaaaatccccctgtgcttctggaagggaaaggggaaaaggaaccatgtggaactacaccagaacactttgctcttcttaacaaggtctcccctaaggagaaattagttaactaaataggatctaacctgctagggttttgttagagcctaactgacctgggataagctgcatacccacctccagcccactctatacatccttccccaactaaggggtaaggagtggggtagactgagaagcaacatgaagttcacagtgtggaggtacaggctcactgaaagatagaaacctaatcataggactgtagaatgcttccccttcctccacatcttactaccacgttactaaaggcctagttatagcaattccttttacccagtacatcgtgcctggctattaagaaaaattacaagacatgctaaaaggcaaaaacacagtttgaagagatagaggaagtatcataactagatatggcagggatgttggaattatcagaccagaaattttgcagcgagttttaggacctacttataagttaggaccttaaagataaattttttaaatatatagggaaatttcaattatagatgaattttagttcataatagtaacaaaccatcctacgtttctcagcttgtgaagcaaattatctgcagtactactgagtcctttagagttaatctttttggttaccaattcttgcttgatggacattagtaccagcccagtgaatcttcccctgtggtgcggtataaattattttagacaatacagactagatgtttattgctatacagatttatcaaagaaatatgtagaagatacatagggaaaattgttatgaatagcatactgaataaacaaatagccaaaataagtttacttaatatggtcatggaaattgatctttggtatttccagtgaaatcaaacttttgaagtatatcttatctgtgaaacttgtatgtattcagctattgcattatctaaaagcttattccatttaagtggtaattgtgaaattttttttgttttgctaataattctctggaaaatattaatcttgagttctgtattctaatgtttagtaatatgtgttcattttattttattttattttttgagatggagttttgctattgttgccgaggctgtaatgcaatggcgcgatctctgctcactgcagcccccacctcccggattcaagcgatctcctgcctcagcctccctagtagctgggattacaggcctgcgccaccatgcctggctaattttgtatttttagtagagacaggatttctccatgttggtcaggctggtcatgatatatgttcattttatgatgtcttccaacaattaagagaaaatgcactacctgaatggtaattgttatgggctgaattgtctccaccaaattcatatgttgaggttttaacccccagcacctcagaatgatatagggcccttaaggaggtaattaatgttaaatgaagtccttaaagtgagtcttaatccattaggattggtctcattataagaagaaaagattagggcacaaatagagaaaaagaccatgtgaagacagagggaaaagatatccatttataagccaaacagagaggcttcaataaatcaaccctgatgacatctagatctggaatttctcatctccagaactgtgagaaaattttctgttgtttaagtcacccagtctgtggtactttgttattgcagccctagcaaactaatacagtcatgatagtaattttccccctagggaaattttcttctctatatggaagtttttttaagattaaaaatttggaaataattttaaatttacagaaaagttgcaacaatagtccagagaacacccttatactctttactcagtttaacctattttttgccccatttgctttatacttcgtctctctacttattcatgtatatttgaaccatttgaaaataagttaaatacactatgccctgttatccctaaatacttcactacacacttcctaaaaatagggacatgcttttacataaccacagtacatttattaatttcagaaaatgtaacattgataaagtactttaatctgttgtccacattgaatggaagatttttttttttactttgaatcactgaggttgtttttgttttattttggttttgctacaataacagtggtttttgtttgtttctttgttttaatttgttttcctggggcataatggctcagtggcagtactatgtcggtagcagttttaatcagactgagtttaaattctacctctacttgcttagttgactgatcttgggaaaaattatttaacctctctgtgcttcagtttctctatctgtacggttaatagggttactgagagaattaaatgaaaaaatatgtaacagcttttagtaaagtacatgccatatagtaaggatttttattatctatccaaatcattttttaagcagtaatttttcctataggcttaacaaagaaatgttgcttctttcttttgcggtcagaaaacaatacctaaagttctactttgaagctctctggtaaaacttcctggaacagcacacaacagacgattttaaaaagataaataaattagagatgatgtcagcagatcattcaattctctagccacctatggtttaaaaaaattaattcataaaacttccattattttaataatttcaggaagctactctatcgtagcagataatataggtaaaattccgtccaatgtgtttactgtaaactgctactccctacatattatgctttgttcatctaacaaatattttgaaagttttttcattcttttctcaggcatataaacaatgtcacccaaagaattaagaatgttttggagttttttcacttccataaaaaacgtcattgttaccaaattcaacagatgtgattgagaatataatgctcttgattcctccttaaccttccttataaagccaatgtttttagagtattttgcagaatcctaatttttttgtactttttattttagtttagctttttaatcaacacataattgtccatatttatggggtacatagtgatgttttgatacatataatgtatagtgatcttatcagggtaattagtgtatcatttcaaatgtttatcatttctttgtgttggaaacattcagtatcctccttctagttatttgaaactatatgttattgttaactatagtcatcctgcagtgatacagaacagtagaacttactccttctatatagctgtaatttagtatcctttaacaaatctctctctatccctttctttctcctacccttctcagcctctaatattttctgttccactttttacttccatgagatcaatttttttttttttagcctccaaatatgagtgagtatatgcggtgtttaactttctgttcctggcttacttcatataacataatgtcttccatttccacccatgttgccaagaatgacaggattttattctttttcaggctgaatagtatctcattgtgtacatataccacattttctttatctattatctattgttggacacaacaacatatgttggttattatgtatttccatatgttggctattgtgaatagtgctggaatgaacatgggggtacagatatctctgacatactgatttcctttcctttggataaatgcccaatagtgtgattgctggatcatatggtagttctatttgtagctttttgaggaacctccatattgttctccagattggctgaaaagccattacatttttaatttgcattagttatgtcattgtcaaccttaaataatgcgattcagaaagtgtgattaagtatagcgtttattcaagtgcgaaacttgaggatagccacatgggaaacacagacttcaaagaaatcgggttagtgttccaaagtgggaaagttgaggtttcacttatataggcagttaacagggttgcaacatgtttcatacagggtcagtacctatgttatggcaatttgattggttacagtttgctacgtttcaaggaagatcagttctacattctgtgagaaggggtgatgatctgaggggatcttctctctggtgccacaagacctttcctgatcatttacaggaaaaaacagaagatgcagctgcatgctacatgactcaggccacatagccaccgtcctttcaaggctcaaaataatttaaagttacaacagctttaagtttaaattatttgcattttcccctttttatcaagatcgtttgaagaaaccatcataggtgaactcaaatggttttggcttcttttattttcaggagctcagtcttccattgctaggaaggcttattactagagagtcatgtcccatggcaaggagaatttgtcagactgtaaagcaaatagagtataggccacatttagaggaaggaggtgactttgtgactcaagtcaggctacatagctgcatcttcagttaaagtatttcattgagcaaccattattttagtcttttcagttgtgtgttgactccattacaaacaaatgccaaagtagcagtaagacaaaaacaggacaaaacacaacaaataattcctagaataagtaacagcttccaccaccatgtttcccaagatctaaaccagctgcctggccaattgttcagagaggtgttggatctcaaaggttggttatttgggttttcatatcagccgttaatttagtgatgttatctgattcatctgggatatagacataagactcaatttttatgatagctcaggtttccccttgggctgcagtatgtctaaagccatatggttctgcaatacagcttttctcataggaccaacttcattgttcaataatgagattcttatgtggctgtcatttagggccttttggtgtgtgtaattggttagggtctctacatgccaaatgacatcctcaatacccagttgtggcagaaagatggaaactaaatgatcttaacagtggaattcagaacaaacccaaagagattgtaaataggaagatttgcaggctttgaaagggtatgaagtattagaccttgtgcccaggcataactcaaagaatactgtcctaaccatcctgggagtaaccatggccatggattggtgtcacacagccaatatagtccatttggagctagccagtaaatacacaatgcccattcagtggcatgccagtcagttttttgtaatataatggtgtgcatacagtattccttagttttccatcccttatttctaatggcaaaggtggtttcattattgggccatgtatcttcagtttgctccttttgttctcagcatagaggagaaagctgatgaagctgaccaaaagagggggttatgccagataaaacagtcccaaatttgtgttataccatccccaattcaagttgtctcatttttcagttgacaacttgatttcagttggggcagtactagcattaaagctaacatactggctttaggccgggtgcgctggctcatgcctgtaatcccagcactttgggaggccgaggcgggcagaccgcctgaggtcaggaattcgcgaccagtttgaccaacatggtggaaccctgtctctactaaaaatacaaaaattagccgggcatggtgcacatgtaatcccagctactcccagctgaggcaggggaattgcttgaaccagggaggtggaggttgcagtgagccaagatcacgccactgcactccagcctgggcgacagagtgagactccgtcttaaaaaaaaagaaaaaaaaagctaacatactggtttcatctactgaaaaatctcttcccatgccccttgctttataaagtgttatcaataggccagtattatatgttatccttagtcatactaagtgttaaacaccaatgattgtttttgagaagcacggatatatttctggtcttctattcagtcttgtccttggaaaggcaatacccaccatggtgggtcagatccactggaaaggggcatgaggctacatatccaacagatgttttcctgtaatttatcagcattgtcttgagcccattgcaagaagatgtttgcttcatagacaagagctggtgatagcaacaacaaaacataagaacaagggatgaaaataaatttagtgggaacttgcaaaggatgaccttctccatctattataattattaatattaagagttcatttagatacaggcctggttcagtgtcttgggaaagctgactacctcagatgctgtctttttcttcttcttgttggctctggagaatttcaattttagatcactggcttgagatgaagtccagattggcaaagtgactttctttaaatgggtgacggatatccaagaattgattccttttagtttagcagcacaagagtcagttagatgcacttgataaggttatttcaccttcgttggagggagtcctttaaaagatgctgtttctggctgggcacggtggctcacgctggtaatcccagcacttggggaggctgaggtgggtggatcacttaagcccaggagtttgagaccagcctgggcaacatggcgaaacctcatctctatgaaaaatacaaaaaattagccaggaatggtggcgtgtgcctgtagtcccagctacttttagggggctgaggcaggagaatcacttgaactcaggaggttgaggctgtagtgagcctagattgcaccactgcactccagcctggatgacaaagtgagatactttaaaaaaaaatacataaataaataaaagctgctgtttccaatagacaaagactcctggttgaagtccttggtccttgggttctttgtcttctaggagcttacagtggaaacactcttttactcaattacagtttttaattagctgccttacaaggccattacaataatacaacatatatccttttaatacaatagattcacagtttcctggagacagtttcataggtctgcctgtttcaaacagagacagccagtatttatcaaaaaggattgatcttaggctaagcaaaaccagtggaagggcttttggcaaaggaattttaagagcctcagttaattttgccaatttagttttgattattctgtttgtgtgttccactaacccagattactggggagcaatatgcataatggaaatgttggaaaataggttagattttatatattgactggattatttgtctggtaagatgagtacccctgttgctatgaagttctagaggaactccccaatttgaaataattttccctaagaattttacttactgctaatgctgttgctcttctggatagaaatgcttctatcctatgagaaaatgtataattcattactagaatatacttgtatccttgtgatggtggtagctgaataaaatataattgtcctaccttgaaggggctttcaggtagaggaaaatgaccttgattgctatgtaaaggtttccctggattatattttgggcagatgtgtcaatgattgtatatctatataccaatccacagttggggaaggcctccaataatactgttttccccaagtaatcattttattagggccccaatgagttaaatcatgtacataagttcagaaagttgactgtaatttggttggaagtatgggtcgatcatttggtccctaccatagcccagtcttggaggagtatgttttcccttttgtttcccaattttcttgttcttttttggagctttatgttgagctaattttatgtcaaaatcaaatgctttcttaaaagctaaaaaggggttgatttgcttattcaaatacacttagagcagccctttttactatattatctgctaaatgatgtactttgctttgtggaatgtctgactttgaatggcttcagatcttgataatggctaatgatttgggaaataatatggcttctaataattctgaagcatggtgtccatttttaatggactgatcagaagaggttaaaaatcctctttgttttctgggcatggtggctcacgcctgtaatcccaacactttgggaggccgaggcagtgaaacacaagagttcccttgacccctttgtgagactcatgaaggggtggcttgctttcttagcgtgcagctctgagcccttcatgggagtgggagcatgcaggtgagcagttgcaggagccagggcaaacaaatgctggaaccagccggccacttctctccagtgggagcaggtcctgtgcaggccccacagcaggatccaagtgtgttacaatgctcttttagctctgccatctggagggagtgccggctacccctagagccccagagggcatatcactagctcagtgggctttttgcctcattgtgaggggcagctgccctctgccagtgagggcaaagggccagtgtgacagcctttttgggttcctgcacccagtggtcctgaaatcttgtccaatgcccaagaggaatgaggtcacacagacttgaaggatggtgaatgcagagattttattgagcaatggaagtggctcttagtgtgctggggtgctggaaaggggatggagtgggaaagtggtcttcccctggagttcaggtgtcccaaccgaacacctctccgaccatccccagctgaactcctctctgactgtagtctctgatgttcagctacttcttctactctgaatgttcaggtgcttctctcttctgtgtgtccactgagtttggggtctggggttcttatgggcacaggatagggggtgtggtgggctaaaagagaacatttaggtggggaaatggggatgtgaagttctcatttagggctgcaggtccaggcttgagggtggaacctttgccagggaccccgcccttctatctagtatttccctgccttctgtccatatcaacaggaggatcacttgagcccaggagttcaagaccagtctgggcaacatagtgagaccctgtctcaaaaaaaaaaaattctctttgtttccataccactccaaagtcatgagctactctgacagcatatctgctgcctgtataaatattagcagttatttcttttgtccacgacaagttctaactaatgctattaactctgcttgttgagctgaggttgcttttggaagacgagaactttctgtttcctcagttaagatactgtagcataatctggtccggtgcggtggctcatgcctgtaatcccatcagtttgggaggctgaggtgggtggatcacctgaggtcaggagttcgagaccagcctggccaacatggtgaaaccctgtctgtaataaaaatacaaaaattagccaggtgtggtggcttgcgcctgtaagtccagcttctcagaagcctgaggcaggagaattgcttgaacctggcagatggaggttgcagtgagctgagattgtgccactgcactccagcctgggcgacagagcgagactccatctcaaagaaaaaaaatgatggctgggcgcagtggctcacgcctgtaatcccagcactttgagaggcagaggtgggtggatcaggaggtcaggtgttcaagaccagcctgaccaacatggtgaaaccccatctctactgaaaatacaaaaattagccgggtgtggtggcaggcgcctgtagtcccagctactagggaggctgaggcaggataattgcttgaactcgggaggcggaggttgcagtgggccaagactgtaccactgcactccagcctgagtgacagagcaaaactccatctcgaaaaacaacaacaaaaaagataatctagcatgatctgcaaaataaattccagattcatccttcaagtaagatccatctgtaaatcaaacaacatcagtgtttagtgaagggaatttcttgcaggtccatcctatgagggagaagttggtcagttaagattatgcaatcctgggccaggtgccgtggctcacgcctgtaatcccagcactttgggaggccgaggcagatggatcacgaggtcagagatcgagaccatcctggccaacgtggtgaaacccagtctctactaaaaatacaaaaattagctgggcgtggtggcaggcgcctgtagtcccagctacttgggaagctgaggcaggagaattgcttgaaccagggaggcggaggttgcagtgagcaagatcgtgccactgcactccagcctggtgacagagtgagactctgtctccaaaacaaaaacaaaaacaaaaaagattatgcaatcctgggccagccatggtggctcatgcctgtaatcccagcacttggggaggcagaggtgaggcgggaagatcatttgagcccagagtttcagaccagcctgggcaacatggcgaaacccgtctctacaaaaattcaccaggtatgatggtgcacacttgtagttcgatttactcagaaggctgaggcaggaggattgcttaagcctggaaggttgaggctgcagtgagccatgattgcagccactgctctccagactgggtgacagaaggagaccctgtctcaaaaaacaaacaaacaaacaaaagtttctttgtcagttttcaaatagtttatctcccctttttagactatcagtctcttgattagctattctattgtggtaaatagttgttagctagacaacagcaaatctgcactttcaaaggcatgattgttaggtgaaaatttacatccctaggcacagaatttagatctaaacagcattatttgctgagacaaagaaggccataggtaaagggccaccagacaagacaagattgccaggtagttttaaacagaggtaagatttcttatgtaaactttaagccagtgtcttccccatcatatttcttgtggtttagatgcagagagggagattttctttataaatgcagatctctttcacaaagagtgtctaaatagccagctaaatgccagaaagttgtattttggagaccaatctagttagataggcagccttttcaagttagcttttttcttgattagattactaacttcagggtggagcccttggatgaataggtcaaagaaagcatgcagtttataggacatatatttaaatatgtgaaaattagacacagctggaaggcagaacacgtagattccctcaaatcaaggagctcatttttacattgaatcctaggtcttcaaaactagggaaatgccacaggattggacagtgcaatgcttctacagtgccccttgctgcaaggacgttcccccaagactggtgggtaacccaacattaatcagctactctgtgatcagcccatcctccatgggagtcttacgccttagcggcaactgtttccatagaccctaagggtcaaaaccactcttttcttatctatatgcaggaagaaatgagtagtctcctacagtaataaccactcattgtaaatgctgtcattgtaaatgctgtcaactacctccatagctgcagtcctcaccagagactttcagctattgcacactcaaaggtcatgttctctcatagtacaaaataatccctggtatccccaaaagccaaagagataagggagagagagcagatctttagacctgagaaaaaccttccataggttttgggactccacaaagaaagcaaaagatcccaaaaggtgggtgttcagtacctttttctatgttccttaaggggtctcaggaccactagaagtctcctctagatttcttcatttgatatcaaagatgacaaaaggaaggaggaacagaagtagaaggaaatggataaataaatcttagaggagccaaattggggggattttattttttcttttttgagatggagtctcattctgtcacccaggctggagtgcagtggtatgatctcggctcactgcaacctccatctcctgggctcaagcagttctcctgcctcagccccctgagtagctgggattacaggcatgtgccgccacacccagctaatgtttgtatttttagtagagaaggggtttcaccatgttggtcaggcggtctcgaactcctgacctcatgatctgcctgccttggcctcccaaagtgctgggattacaggcatgagccatcgcgccctgcctggattttaagcttttcaaaacgcaaaaatcatgttactcaaaattgttactaccagatgttgaagaatagctatattattaattgctattagattctgtacaaatttctaacctctaccattagattttcttatgggaaggattagagtgttacaggggcttgtacaaggaataatcaagcctctttttatagaatccaaaactacagctcttactccctccaaggccttcaatcttagagggtattgcttaaggtttgggacaggttttgatggatctatctggattttgactggaggagctaagataattttcctcatatcagtggagaattttgactacagctaattaggcactacttttaagagcgcttctagttctttattatttaacaattcagtatcctctatggcaatataaattgcaattaaaaggatcagatttggaaaaatttttgtatctcacaattttgttttaccttctaattctaaatacacttcccccttttgagaagagtatggctattatataatttaaaacatttctccttatcaaatgcatgggggctgagggaactaagaggaaaacatgtgttccctctagggaacctaactgaaaaactataggttgagattgatatgctgttataggagtatttgttacacccaccatctgtaatggtttttgactccaaggaataagactctgtaagaaggtgggatttattattgataatgcagctctggtgtcattaagagcttgtgtttggggccaggcgcagtggttcatgcctataatcccagcactttgggatgccaagatgggtcgactgcttgagttcaagagtttaagaccagcctgggcagcaaggcaaaaccctgtctctacaaaacatacaaaaatcagccagccatggtggtgcacacctgcagtcccagcaactcaggaggctcaggcttgagttagggaggcagaggttgcagtgagccaagattgcactactgcaattcagcctgggtgacagaatgagaccctgtctcaatacaaaacaaaaacaaaaacaacgtaggccctcgctaacaatatttttcaaaaaaaaattttttttaatttttaaagagcttggtttgttttccatttaaagttatttcagttactcctaaggtattagtgagaagagggaagttccctcttttgatttcctcagggcactcctattcttccttttctttggactgttttcattctttccattttaattttctacaatcctttttgaaatgtccaggctttttttttttttttgcagtcattgcaatgcaggagattgggtcagttttggagtttaaaaaggctttttaggggttttaattggttggacaattgttttaattgtaaactcataaccttatttggttttcttccctgtttaacttctctttccttttcttccttggttagggtatgggacctaggtcccatagggtatgggtacgttcagcaaaataaactagataatgagtttgaggataactaactggtgcattgtttctttattataattgctaattcttaatctaatccatttataaagtttaagttacaaggccaggcactatggctcacatctgtaatcccagcactttgggaggccaaggtgggcagatcacctgaggtcaagagtttaagaccagcctggccaacacagcaaaaccttgtctttactaaaaatacaaaaaaaattagccaggcatggtggcgtgtacctgtagtcccagctactcaggaggctgaagcatgagaatcacttgaacccgggaggcagagattgtggtgagccaagattgtgccattgcacaccagcctgggtgacagagtgggactccgtctcaacaacaaaagtttaagttataggaagtatcattttggtggttagtataactttattctgataggcctgaatattttttaatgttttttccccaaatctttcatagtgtgacatcaaaggcttgatatagtttggatatttgtcctgtccgaatttcatgttgaaatttgatccccagcgttggagggacctagtgggagatgtttggctcatgggggcagatcattcgtgagtggcttggtgccatcctcacagtaatgaatgagttctcattctattggttcccatgagagctgattgttaaaaagagcctggcacctcccctcaatttcttcctctcttgccatgtgatctctgcacaccagctccccttctccttctgccatgggtggaagcagctggaggccttcaccagaggcaaatgctggcaccatgcttcttcttgtacagtcttcagaattgtgaaccaaataaacctcttttcttataaattacccagtctcaggtattcctttatagcaacacaaagacagactaagacaaggctcatgaaaattttgttgatgttgtattttgttccaatcaaccactttttgaaaaactaaggggatagcatctagtaaagctttggcagtgttgcaggcccattcacaatctgcttcagaacatttatggaagttctctgaagaatttctctaatgtgcctttgctatcctatttggctttatcaaagatgaacgaattgatataagtcagagaatctgggattgaaagtttgaatgtttaattcaaattctctagcaaatccaatagaatcctgaagaggattaggaaattatttaattatgcctttaagttctacctttgagcatggttgataaatcaagcaggttctcttctactagacacacagggtattccctaaatggagccagtacagcatctggaggaggaggaggaggaagggaaggtagtctgatagacaaggaagttctgacaatgagggacaaagagaagaaggagctgaaggagaagaagaaatgtcagggtttttcaattcaaaattattttagacaattttttcatttcctctttcaaagaaatggctttatcagaaagcttctaagtaccattgaaaatagctctcccagttattttgttttattttagagccagcttttattttggattcagggggtacctgtgtatgtttgttatatgggtatattgtgtgatgctgaggtttgtgggtacaaaggatcccattacccaggtagtgagcatagtacccaatatgtagttttttagcccttgcccacccccaagtagttcccagtgttaattttccttctgttatgtccatgtgtaccgatgcttagctcccacttataagtgagaacatgcagtatttggttttctgttcctgtgttaattcacttaggataatgagagctggatttttaaaaattgagtatgcagagaaactagtttaggtatttcaaaggtacccccattttggccactgtaatttggggtcattgcaaattatgcatgactaattttctaaatatttacatgaagatgtgccgtaagtattaaacatgaatccagcttacgtttctagtggtggatctcttcttcaggaggaatacttggttttagatgcatgattacccagactttagattttcctcttgaatgaccaaacaacttagataggagatattttggattaagtgtgccgcctgtgggaatagcccctcaaggtgtcacccttgtgttggtttttcccttttatgtgtcttggtgatcccaagaggcttgggtgcttaaggcagtaggtgatcagctgttatgtgtgttcatttaactttatggtttttgtttgtttgttttgctctgtcacccaggctagagtgcagtggtgtgattacagctcactgcagcctcgaattcctggtctcaagtgatcctcccttatttcagcctcccaagtagctgggactacaggtgcacaccaccacatctggctaatttcttatatattttttgtagagatggagtctcactgtgttgcccaggttagtcctaaactcctgggttcaagtgatccttctgccttggcctcccaaagtgctgggattataggcattgagcctccgtgcctggctctgtatgctcttcttaagggatttcctgtaagactgtttcatgtcatgaacaatgagctccaacactcccacaaagacctcgggtagcctaaggtgcctttcagttggcaagaacagtgtctctcatctttgggacttattttgtcctcataaagagccttttgtagttttaattactcaagaagaaactttaggccaggcacagtggctcacacctgtaatctcagcactttgggaggctgagatgggtggattgcttgagcctaggagtttgagatcagactggacaatatggcaaaactccgtctctacaaacaatacaaaaaattagccaggtgtgggggcgcacacctgtagttccacctatttgggagactgaggtgagtgaatcatttggacctcggaagttgaggcttcagtgagccatgatcatcgatactgcactccagcctgggcaacaaagggagaccctgtctcaaaaaaaaaaaaagaagaagaagaagaatatttatatttgtcagttgtcagttgaactgagcttcagaatctggttagttttaaagattacaaattttgcttaagtcacaaagattcatttcctcttttcaaagataaactgttttctccctgaccaaagtttcaaatgagataaaaagttatagaaatgctaatgaggctgggcgtggtggctcacgcctgtaatcccagcactttgggaggctgaggcaggcagatcacctgaggtcaggagtttgagaccagcctggccaacacagtgaaaccctgtctctactaaaaatacaaaattagctgggcatggtggcacgcacctgtaatcccagctactccagaggctgagacaggagaattgcttgaacccaggaggcggaggttgcagtgagccgagattgcaccactgcactccagcctgggccataaagtgagaggctgtctcaaaaaataagtaaaaggaaaataaataaataacaaaataatgtttaaacctctaccaagctgggaggttcagaccctgagagatgccttactagatatttccattaacttcagcaagattgggtgaatgaaagtaatttgtgttggtagcagcgttccagttgtcagcaaagtgacagatatcactggaggtctgctttgagtcccttcatggtgaccaaaatgtcaaccttaaataatgagattcagaaaatatgataaaatatagggtttatttaaacacaaagtatgatctgatcactgtccatttgtttttgtgggctggttgctgaagggtcagagttctgtcttcatgtatagtctggtcattgtccatttgtatatcctccagtcccttgctactaaaaacaaaaatgacagccacctgggaaacacagaccccaaacacgtgggagcaagtgttccaaagtggggaagttgagtttccatttatataggcagttaacagggttgtaacatttttccatacaaggtcagtccatatgttatatgttatagtttgttacatttcaaggaagtgattggttacagtttgttacatttcaaggaagactgccttaacattcagtgatcggggtgataatttgaagagatcttgagctacaaggcttttcctagtcatttacagtaaaagcagaacttgcagcggcatgctactggctcaggtcatagaaccacattcctctcaaggctcaaaattatctaaaattctgccagctttaaatttgaattactcagtttcacaccatcataggcctaagctcacattttattcaaaacaacttcaatgtagtatagataaattttcataactctttgtaagttgatatgatttatctctttaatattaacgaaatttaggaattaccttctgatgtttgctgcatatatatgcacagattgatggcaaatattttattgcactatttagttctgtattatactatcaacattactgtttttctaaaataaagcagaatcttttctttgttttaaaatgatctcagttcccaaggaagaaactacaccaatttgagtctgaaatatcaaacattgaagaatacaaaatttattttctaagcagtgaaaaaccatgtatctaatgaagcaagttggttcagatggtgtagctggcaaacaggacaagagctacgtagaggtagcaagactgaaacttgatcttggttggaatggaacaaaatgttcatagtattattattattattattattattattattattattattattattattttcgagtcagggtctcactttgtcacccaggctggagtgcagtggcacaatcatagctcactgcagccttgatctcccaggctcaagtgatcctcctgcctcagcacccccaagtagctgggactacaggtccgcactaccatgcccagctaatttttttttttttttttgtagagatgggattttgccatgatggccaggctggtcttgaactctgagcttaagtgatctgcccaccttagccccccaaagggctaagattataggagtgaaccaccgtgcccggcctagtgttaattttctttttgcatgatttttacactactatgaaaataagcaaagtccacccaaatgagaaccaacagaattcatttattgaaatcttgctataacaaggaagtcagccaacatcgctttcgttgggcagactcaaaaacgagtaggcaagttttatagtgaaaaaaatacgttaaggtatgatctaattggaggttgttggcatggggaagttgaaggccagctatctaaaagcagagcatcttagggaattaattcaggaaacatagttggctttctgtggttggccttgagttgaaatcatgcaggggttggggcacaaaaatagagaagctggtagtcattgatcaaatcctcgctgtcctggggtgattgctgccaagattgtaatttggatttgcaggctggttgctgaagagattgtaggtcagagttctatcttcatgtatggtctggtcattgtccatttatatatcttctaatctctcactactgaagaacaaataaaaatgatttgtgttttataattttatggaagaatatattcatgtagctttgagagatttgaagattctaatagttacagaaatcttcccagatgaaaattatattttatgtctgagaatataagatgaattatgtttatactgtaagatatctttgcaaagttcttgttacagtagaagtagattctggacctcaaagatatatcagttacaataataatatgtacttatggggtcttttgagaaattataacctggtttgtactacctcagaaagattgagcattttctccatgacttattggataattgggacttttaaagatgtaagaaagaaagttactggtatatcaccactggaaactcctcacattgcaattttctatagaggaaatttgttggctgtgatgaatattatatttaagtttctacagttttttaaattaaatttttattttgagaaattttcaaacagaaatattttatataaaaattatacagcatcaatagataaagctgaagtatcctttatcctctcccctcctgccccattttctgtcccctttcttcctgtaagaggcaacctctcatgaatttggtgtgtgtccttttaactcataaaatcattatttctaaaaacaatgtaattgcccttacttggctaattataaacacaaatatggaagttttgaaagacttactttctagattcttttagattagtaaattattataataagcctgaaaaacagaacattattcaccaagtaattcaaccaagtaacatatattctgtgttaaatagcatattgtctttgtattggtattaatgtatctaattagtggcaggcatctaggtctctcaaggaaggaagaaggagaatttggggaaaagaaccaatgaaagaaagcacagattgacactttgagaaatgtgtaaaaaatgagtcagaggtttttctcttgatcttggctgaaagtatagctaggtctcaagtttgctttgatctttttttgcctggcccttacagaagcaatgctttttctttgtttcaaaatgaatgggcaaatatatatactatacttgtcaatctcagtgttttaagtattgccaatttgacaccaatgtggcagaaccaagttcaatttgttaagagtttaatttattctccaaatataagttgcttctgttttataaatacctacataaaaagcttaagtcccagcaataatttaataaaatcctatgcatcttgttttaaatactcctgtgattcacagacaatcacagttgactgaacaaaaacctatatttagtaactatttgaaaggtactgtaattaagtctgttttagttctaatcattactaacactgtggataatgcaggaaagggggaaaacacagctcatcaaagaagagacccatgagatggatatagctagtttaatcatagtaaaaaaatcccaaggatgttgacacatctgtactatcattaatgagagatatagtacaaagacttcatctgaaaaggatgacttcatggagtatcaatgactttacatctcttcaaaggataaaaagggtttatgtttttctggtgcctgaatgttttaacttgttacattgactgcatgatgagtactatggtttgtgatttaaatgtattatgaacataattttttctttgcatctaaaattttgtttttggcttaaggaagaacccaaaatgctattcattcactggtagtatatctgtgatttgtagcatgttctataaaatttcatctccaaggataaaaattttcttatatttgtacataaataaaacttttgtgagcttgattaatttttaaaggagttatacttttgttatccttaacttttaaattggagtattttctttgtattaataggcagaagactatagccttaattttatcagtaggttaggaagcattttcctatatttaatctctatattgctttcagtttttggctttcttgaagataaccaaaatgtcaattactagggaattctacaatctgagagtgataatttgaaatctgttataatgacataaagatttattttttgatatttttataggaaatggaaatactggcaaactaaaaatatttgtttatggctacttgttatttctaatcctcttcctaaaatgtaaggaattaaaacttgaaaatttatttatggaatggtaaattagaaactgatagtaaatcagaagactgacgataattaaaacattataatattgggaaagtagctaaagaagaccttggaaaattattattagatgtcttcaggaagtggctgtaaaaaatatacctgtcagttgacaaatgtgcattttattttattttttttttgagacggagtctggccctgtccgccaggctggagtgcagtggcgcgatctcggctcactgcaagctccgcctcccggtttggggccattctcctgcctcagcctcccgagtagctgggactacaggcacccgccaccacgcccagctaattttttgtattttcagtagagacaaggtttcaccgtgttagccaggatggtttcaatctgctgacctcgtgatccgcccgcctcggcctcccaaagtgctgggattacaggcgtgagccaccgcgcctggccaaatgcgcatgttaaattaaatagttaacttattatttctaaaatctatggcgtttgaatttaagatgacgtttcaaatagacataaaatgttttgctttaagattttacaatataatacaactatttgcatagccaacataggtagccttggtacctcattaggtaaagtggagttttttcctcattgttaatgaaaaggataaggttccctaaaagagagcaaaaaggaaaataagatattgcttttaaaattctcttctttaattcctgtttttcagaggatagctggctcacatattatgtttctaaatttatcagttccccgccaatgagacaaatacatctttacaaagatttatagattgctaggagttttctggtccatatttacaaaaaaccctcaatttctaaacaaattatattctaaaagtttgttttaaaatgtattttagaatttttgatatattttttccatagaaagagttataaatggtaggttcctaggccagtccacagaagtatttttaatccataaagtagtgaggaataaagatttgttttaaatatttttatattgaatttaatgctggcaatttaaggaaagcagttagtttgaatcacaggattgggaaacttgtatggaaattctaaaaaggacttatggatacattaaaattggcttcagaaactatttctaattttttgtctaaactccccactatcttttgcaaatgcactactattcttgggattaatagctcacaaatggaacaatgagagaaattttctttgagtggttaggtgtagctgaaagagggattatggtaagaggatccataaataataaaaatttgatatgtgatttatatctcagtgaagctgttctttaaaaagtaaaaaaaaaaaattatggttctgtttaaaaagaaaaaagtgaaaaataaaaataagaaaataaaagcgtgaaagaggaaataacttcttgtgactaaacttccaaataacaaaagaaagagtggctttacattacttagttgtttgtatttgttatgataaatgtcaagtaagccattaatttttactaaattcagtaaaaaaccttaatctgacagctagggaaagaaacaaatggcaaatatagagtagatgatcttttttttgttttttctttttatgagatgaagtttcgttcttgttgcccaagctggagtgcagtggcgccatctcggttcactgcaacctccacctcccgggttcaagggattctcctgcctcagcctcccgagtagctgggattacaggcacgtgccaccacacctggctaattttttgtatttttagtagaaatggggtttcactatgttagccaggctggtcttgaactcctgacctcaggtgatctgcccaccttggcctcccaaagtgctgggattacaggcgtgagccaccacgcnnnnnnnnnnnnnnnnnnnnnnnnnnnnnnnnnnnnnnnnnnnnnnnnnnnnnnnnnnnnnnnnnnnnnnnnnnnnnnnnnnnnnnnnnnnnnnnnnnnnnnnnnnnnnnnnnnnnnnnnnnnnnnnnnnnnnnnnnnnnnnnnnnnnnnnnnnnnnnnnnnnnnnnnnnnnnnnnnnnnnnnnnnnnnnnnnnnnnnnnnnnnnnnnnnnnnnnnnnnnnnnnnnnnnnnnnnnnnnnnnnnnnnnnnnnnnnnnnnnnnnnnnnnnnnnnnnnnnnnnnnnnnnnnnnnnnnnnnnnnnnnnnnnnnnnnnnnnnnnnnnnnnnnnnnnnnnnnnnnnnnnnnnnnnnnnnnnnnnnnnnnnnnnnnnnnnnnnnnnnnnnnnnnnnnnnnnngaatttggcagttaggaggcattttagtctttagactactcagtttactctatattgactagaatttttagtgaaggatcttaatctcatagtctatgtcacaaaatgtacatcacagcgttttttcacagaattaggaacacatacattatttttaataactttgaagcaaaaggctacttggagtgcattatctccacatacatatatataatatttataatattttatatatataaaagacatggtctcactatgtttccaggttgaacttgatcaaactcctggactcaagcaatcctgctacctcagcttctacgggtgtgtaccactgtgcttggccaattgtttactctgtatttttcaccatgaagttaaaacctaaaattaggatatcatttaggaaaaaaagattaggtgctgagattaacttttttttttttttttttttttttttgagacagagtctcgctctgtcgcccaggctggagtgcggtgatgcttgtcggctcactgcaagctccgcctcccgggttcacgccattctcctgcctccgcctcctgagtagccgggactacaggcgcccaccaccacgcctggctaatttttttgtatttttagtagagacggggtttcaccatgttagccaggatggtctcaatctcctgacctcgtgatccacccgcctcggcctcccaaagtggtgggattacaggcgtgagccaccgtgcccggcgagattaacttttaaaatatttgggcttcaactttattcccacacacatttccagaacccttgggctttggaggagtggcaaaactccacttccatcctcttagggtcccagctgggtctgagaattaaattgacataagacattaacaggagaaaaacatacaaatgtatttaatacaaatttcacacggcatgggagccctcgtaaggaactgaagacccaaagaagcagttacagtcaatcactggtatactgaattggacaaaaaagtagctgtgaaaaagcagctaaattgtgtggggaggcttaaaagataacagttattttaacaaggtctgtacagaattcctttggtctcaacttcatccttgaggataaggatgttttattccttttggtatagggagggtgtctttcacatgggaatttcatctcctgcttttaagaaacagaaaagaggctagaaggatctttttgcacctgctgcttttcaagtgcctttaattcaaaatagtcaatatgtcagagtggtatatttttaactccttcagcttaaatggaagattcatgttttcttgaaaggattaggaatatgaagtttcctgcagaattttacaccaaagatgtataaacataagaactttaccagaatagggcagtgagagtctgaaacaatctttcagggaaaatctgacgatatctcctgaacatgtatgtaatcttttggctagactcacagacttcctaaaaagtatgatggtaaggagaaaaatttttcttctgattctgttgtgaaagagtttgtttgtttgtttgtttgtttgtttgttttcttttgagacaggatcttactctgtcgcccaggctggagtgcagtgacacgatctcggctcactgcagcctcgacatccagggctaaagtgatcatcccacctcagtctcctgggtagctgggaccatgggcacatgccaccactgctagctaattttttttggtatattttgtagagatggggttttgccgtattgcccaggctggtctcaaactcctgagctcaagcaatttttttttaaactggtgatggttcacaacttgtgatacctaagtttgtgtatatatcaataatatatataaacaacatgcaatattcatttcctgtatattttattctatgttaagttttttggaggtaactttgtctactcagcaagtagaatgttacgcagcaagtaaagtcattattgttttgtttagtcttgctttgtttttgcaatcctaattaaggataatattcacttcccatccagagagtataccaatcctttttattctgcttttcactttcccgtttccttctttttctttctcttttaaaacttacacaaatgtcatacatgaaaacactgccattgcaaaaacttccagaaatagaaatacagaaggctgggcgcagtggctcatccctgtaatcgcagcactttggaggctgaggcaggtggatcgccttgagcccaggagtttgagaccagtccaggcaacatggcaaaatcttgtctctttaaaaaatacaaaaattggccgggcgtggtggctcacgcctgtaatcccagcactttagaaggccgaggtgagtggatcacaaggtcaggagttcaagaccagcctggctaagatggtgaaaccctgtctctactaaaaatacaaaaaattagcccgggtgtggtggcgagtgcctgtaatcccagctacttgggaggctgaggcagaaaattgcctgaacccggnnnnnnnnnnnnnnnnnnnnnnnnnnnnnnnnnnnnnnnnnnnnnnnnnnnnnnnnnnnnnnnnnnnnnnnnnnnnnnnnnnnnnnnnnnnnnnnnnnnnnnnnnnnnnnnnnnnnnnnnnnnnnnnnnnnnnnnnnnnnnnnnnnnnnnnnnnnnnnnnnnnnnnnnnnnnnnnnnnnnnnnnnnnnnnnnnnnnnnnnnnnnnnnnnnnnnnnnnnnnnnnnnnnnnnnnnnnnnnnnnnnnnnnnnnnnnnnnnnnnnnnnnnnnnnnnnnnnnnnnnnnnnnnnnnttgtaatcccagcactttggaatactgaggcagttggatgacttgagccccaggagtttgagaccagcctgggcaacatggtgaaaccctgtctcttcaaaaaaaaaaaaaaaaaaaaaaaattagccgggcttggtggcctgtgcctgtagtcccagctacttgggaggctgaggtggaagtatcacctgatcccagggaggttgaggctgcagtgagccattatcatgtcactgcactatggccagggtgacacagtgagacccagtctcaaagcaaaaaaaagaaaagaaagaagtacaataaaaagcagtgttacctttttcctttcctcttctatcttattcccctctccagaaatcactactttgatgtttcattcaaaatctttttctgtttatttacatactatttctatataaagaaacatggtttgcagggaattttcctccttttatataagtagggtcatactgtctatatttttagcaacttgcattttttttttgagacggagttttgctcttgtcacccaggctggagtgcaatggtgccatcccggctcactgcaacgtctgcttccttggttcaaacgattcttctgcctcagcctctcgagtagctgggattacaagtgcgtgccaccacgcctggctaatttttgtatttttagtagagacagggtttcaccatgttggccaggctggtctcaaactcctgacctcaagtgatccgctcacctcagcctcccaaagtgctgggattacaggtgtgagccaccgagcctggcctgcattgtttttcagttaatgaaatgtagaggtctttccgtagcaatactactatttaactacaataaccacttcataatgttccacagaggtttatttaaccatactgaactgatgggcagttaaggttttatgtctgtcatcaaaattctcagattttctcctctcctattttttctgtttttctgttttattctgttctgtctgagatttcctcaactttgtccttctcttaaggttttcatttttgttattactttcttttttttttttttttttttgagatggagttttgctcttgtcacccaggctggagtgcagtggtgtgatctcagctcactgcaacctccacctcacgggttcaagcaattcttctgcctcagcctcccaaactagctgggattacaggcgcctgccaccacgcccagctaatttttttgtgtttttagttgagacggagtttcaccatgttggccagggctggtcttgaactcctgacctcaggtgatccacctgccttggcctcccaaagtgctggattacaggtgtgagccaccgcgcccggcctgttattacatttttaatttatgtaagtttttctgtgtgtgctgaatgttttttaaaagttttgtttgttacagttatctcttggaaataatttttttcctaatgttttcttctgctggcatagtttctttctaccagattgctttcttttcttttgttaattttagtctctattttccaaatacaggctttctttaggtatctagtaattcttcgctgcctgttcttttttttttttttttttgagacggagtctcgctctgtcgcccaggctggagtgcagtggcgcgatctcggctcactgcaagctccgcctcccgggttcacgccattctcctgcctcagcctcccgcgtagctgggactacaggcgcccgccaccacgcccggctaatttttttgtgttttttagtagagacggggtttcactgtgttagccaggatggtctcgatctcctgacctcgtgatccgcccgcctcggcctcccaaagtgctgggattacaggcgtgagccaccgcgcccggcccgctgcctgttcttaaataagaataggtgaataaaagccaattgggaagcctaagtacatgggatggggcttgtagattttcagttttannnnnnnnnnnnnnnnnnnnnnnnnnnnnnnnnnnnnnnnnnnnnnnnnnnnnnnnnnnnnnnnnnnnnnnnnnnnnnnnnnnnnnnnnnnnnnnnnnnnnnnnnnnnnnnnnnnnnnnnnnnnnnnnnncacttagtctccttgtttttcagaagatacctgcgtcctctactgtacctggtgtcctctaatctccagtaaaataagctgcagacttctgccatgattgagttattagggagagatggtcacctggagatgtggaatggaggaaggaaatctaaggatctaacagcttcttaaatatctttcatccaatttttcttattttatccattccactcccaacttacccccagttccacaggtccatagtcttgccaattcttatgcctttagaaaattctgtggtatatattgctttcctcactgccagtttaggacttggctcattcagctttcctcactgccagtttaggacttggctctctttggtcggctaagtcagttaccactctgtcatctactttctgatttacaaaaatctgttgctttttttcttcttctcttttcctccttatcctttgggattatgtattttaaaatttgccttaatttttgtcttagtagggtttctgaaaggagtacattgaatattaatattagatctgccctcttatcctgggagtctcttatgttatttctttgatagagagactgcagtacatagtagttgagagtgtgagttatagcaccagactgcttgggtttgaactctgagtctgccacttactagctattagattaatctctacattcctattttcctcatctgtaacatgggggataatacttcctttgtagggtgaccagagaattaattaattagttaattaaaattaacttatgtaaaggacttagagcaatgccttgcacatagtatacccttaatgaatattcattatcaatattatcttccctctcttttctctgtcttattttcctagaactcctgttagtaaaatattaatctccttagatttatccttgaagtatcttatttttctttcatacttttcatctcatgtgtagttatactttcctgggaattcttgtaacctctgcttaatgtcttattttaacaatcttattttatttatttttttgagatggagtcttgctcttttgcccaggccggagtgcagtggcgtgatctcggctcactgcaacctctggctcccaggttcaagtgattctcttgcctcagcctcctgagtagctgggattaaaggcacttgccaccacgcctggctaatttttgtatttttagtacaggtggggtttcaccatgttggccaggctggtctcaaactcctgacctcaggtgatctgcccgccttgccctcccaaagtgttgggattacaggcatgagccaccgtgcccagccaacaatcttattttaaatatcaaacagttcttttgacatctgattttaatctttcatgttaagggattttctcacatgtccgatgacctttggtagtttgtgcatatttattttaaattgattaaaagctctttaggaataaaactaattgtggagtaagtaaggaataagccttacttttgggtgttaggatggacataattattattatgaagaggatcttttctctcagattgtgcaatgcctccaaaaagactttcaatttctcgcctgggcaataaagtggaagtgtttcgggtcagtggtggggtggagtgggagagtgggtaggggaattaagtcccaccctttggtatttcaagaaatccatttgttttctatctatctgtcctacgtctactctattttgcctagtgtcctcatgtctggaatacccctcttcaatttctcaagaggatacactgccattctccaaccaagtcaggggtgtatacacttagctgctagcattctacacatgggagtagggaggagaatcaactgttcacatacacagacttttatcctggtttttcactttgtgcttcctcactacccactgggtacttccaaggtcagaggttttcccagattctttgggggtgaattggctttcttctcaccaatgtccccctttgtaatttcctgagattatagcttcctccactataacaagtcagataccactcctccatttgttctcccttttctaaaaatatgttatccactgtaaaacatgctatgtactccctcttctatttgattgtccttgaggatttaaaccttttaaattatgttgccatcattttattaggggagcagagaaatacatatgcttgatcttccttttctttttgacagaagtcatcagatgaatgttattttaaaatattattgcatttaactatactatttaattatataatgagctggcattccctagtacacctggaaaaagtagtccagatttgttcatatagatgtagagtttggctgccatgaccacaccctcctctttataacaagcaagtggtagtgaacaaactcaggtcacaggatccaatggaaagagtttgaattcccatagccggggcaggttcctttacctatggttaatgttctagagcttgactttccccatctctgctagaaacagactttactcagccacaattccattttcttttatttccccttttgcctttactagcttgaattactggcattaactgaggattcttcttctctgacatacaagaaagataaggtccatttggtacactctgaacatccatacagtggaatactactaagcaattaaaaagaacaaatgatgcatgctttaacatctgtgaacttcagaaacattacgctaagtgaaagagccacatgcaaaagattacatatgaaaggttgagaaagagcatatctatggagatagaaagcaagttagtagttgcctgaggctgggatgcctagtggtggggagactgtgcatgtgtaggggcaaagagtatatgggaactctctgtacttcttcagttttgctgtgaacctaaaactgctcttaaaaagtctattaaaaatatattttaaaatgtcctcaaataggaattacactttaaattataaaaatgttagcactgcatatataaagctctgtgcatcctaggtagcaaatttaaacaaaattactatagcatttaattattaatttattgggatttaggtttattgacctcatacctcataagtgaggccttcttctttttttttttttttttttttgagatgtagtctnnnnnnnnnnnnnnnnnnnnnnnnnnnnnnnnnnnnnnnnnnnnnnnnnnnnnnnnnnnnnnnnnnnnnnnnnnnnnnnnnnnnnnnnnnnnnnnnnnnnnnnnnnnnnnnnnnnnnnnnnnnnnnnnnnnnnnnnnnnnnnnnnnnnnnnnnnnnnnnnnnnnnnnnnnnnnnnnnnnnnnnnnnnnnnnnnnnnnnnnnnnnnnnnnnnnnnnnnnnnnnnnnnnnnnnnnnnnntccagcaggtttgaggaatgacagagaagatttgtgtgacttggaacaaaaagtgaaagaatagtattacaaaacaaaatcagagagctggcagtgtattagatcaagtagggtcttgtaagccatggtccaggattttgaatttttccctgagtgagatgggaaggctgagcagaggaaggacatgatctgatttgcatttttaatggatcattctgggtgctgtgtggagactagagtaggaggaaagaatgtagaaaaggggaaagaattagtagtagttgtccaggtgagaaataatgatagcttagatcagggaagtagtcttgaggcagtaataagtggtcaggttctggatatattttgagagaagaagcaataggacttgtttatgtggtgtacgtgaagggaagaatcaaggaaggataaattcaatgattttgactagagcaactggaagaatggaattgccccttactaagatggagaagagcaagcttaaagggaaaaatcaagagattggttttagacacttaagattacctgttcaagtggaaatattgagcatgtatggttagatgtaagaacctgaagttcagaagagaggtatgactggaagatacaaatttaagcattggctgtaagtaaatggtatccatggaactggctttacaattacgcactatacatacaatgaaaacttcgtctgtttttttttctttttccttgcattatggaatattgatgtcttgttcccttttggactcttctctcttttttttttttttttttttgagacagagtcttgttctgtcatccaggctagagtgcagaggctcaatcttggctcactgcaacctccacctcctgattcaagtgattctcctgcctcagcctcccgaatagctgggattacaggtgcccaccactgcgcctggctaatttttgtatttttagtagagacggggtttcttcatcttggccaggctggtctcaaactcctgacctttctacttgccttggcctcccaaagtgctgggattacaggcgtgagccaccacacccggccaggactcttctctttaaacaatgatttttcaccttcatttatttcctgttttaaaatagaatttgaaatcagcagaaaacttttggcattgtcaacctcatcagtttctgcaaattatcttccaaaactacaaatggatatttaaaattcataatatgtagctcttaattattagatagttgaatgtcatttaagaggtgcaggccattcagcaagagatagaaaaagtgtcattatgaatttaaaatttaacattttagacaggtatggatttatggcatcattctcaatcatgacttcagggtctatgtgttctcttaggttcatttctttaattttctctattttaatgtaaaggaaatgtgaaaatttgaattacattcttcaaagttattagaatcattataacaggaagtgttaatgttaaaaagtctttatcaagacctaatattaaattatataacttgcttgttctacttttctataaaggttaaccttataccaacttaactgcttaaggatattacctgcttctttttcattataatgagcaaatctgtgtgtgggagttcatacagtatttgttcattggaatcactttcagaaaatgacagttcagttctgttaattgattgaagaaagctttttaaaaatcattttaggccaggtgcggtggctcacacctgtaatcccagcactttgggaggctgaggcgggcgaatcacgaggtcaggagttcaagaccagcttggccaacatggtgaaaccccatctctactaaaaatacaaaaaataactgggcgtggtggcacatgcttgtaatcccagctacttgggagggtgaggcaggagaatcgcttgaacccaggaggcggaggttgcagtgagccgagaccgtgccactgcactgcagcctggcaatagatcgagactccgtctcaagaaaaaaaaaaattattttagatttttttctactgcagtttttaccatactgcttttgacactatccacaattatacttagtagaaatgctaaattggtaaaattatgccacatctccttctgtaaatttctactctactcttatgtggttgcaagtacatagctatctttatgtgagatattactgcccttgctagaaacctcaaaatacctcataataccaagcttatttttaaagtgatggttttaaaggctatgcataataagcttcagttgtcttcagtatagttgattattcattacttattcagcatgaggtaatatgctatgtgtatctaatcaaagtaatcagtggtttctataaataaattgtagtcgaagaagcatgttaattagtaaataaacacacagttgcttctcaatttacattagttatgttccgtaaagttaccacaaacactgaatcagtgaatatagaagcattgctcctagaggaaatagagggttaggttcctgtgagcctctgttcatgacatttttatcaaccagtcaatacaaccttgttttatatgtgtttctgcttaaagataccgtattaaatatatattgttgattcattaacactgaactcaaggccaagagttaagattatttaacacaactatttttttcataaggcacctcataaccttcttatgtgtcagaacactagatagcatatcagcattatgcatggggaacgttgtaaacagcaaggttatcagcacaaagcataaaaatgcgaaaaacatagcgtgaaagagactgagaaaaggacgctgtgagagctaaaacaagaaggcaaaacaaacattactttgacctgagctgggaatgtgtgcttcaggtaactcaaatttttaccactctgtacatgtccatgaatgactgtgaaagtattgacttaggggttacaaataaattttagtgactatgtggatttgcaaatacagaccctgcatataatgaggatcaactgtatgtatgtgtgtatataaacatacacacatatatatatatacatgaatgttttttcattcctgcctggaatgcattttaatctcttttctatctgttgtattctcactattcagctcccagcttggatgttatcctatctcagaaacctttcccagctctcttaaatactcattgagtatgatctcatatccctgtgtacatgccttgtataatatttttcacattttgtgttaattctttaccaggattctttaaactgtgagctccataatggcaaggaccttttctcatttacctctgtattcttagtacttaacacagggactaacacacagttgaaattaaataatttttttttctttttttttgagacggaattttgctcttgttacccaggctgcagtgcaatggcgtaatctcagctcactgcaacctctgcctcacaggttcaagtgattctcctgcatcagcctcccaagtagctgggattacatgtaccaccacgcccagctaattttgtatttttagtaaagatggggtttctccatgtttgtcagggtggtctcaaacccctgacctcaggtgatctgcctgccttggcctcccaaagttttgggattacaggcatgagccactcgcacctggtgaaattaaataaattttaaatgaatgaatcaataagcctctctgcaaatggatttattattattattattattttgagatggagtcttgctctgttgcccaggctggagtgcagtgatgcagtctcggctcactgcaacttccacctcccgggttcaagcagttctcctgcctcagcctcctgagtagctggggttacaggtgcatgccaccatgcccagctaatttttgtatttttttagtagagacggggtttcaccatattggccaggctggtctcgaactcctgaccttgtcacccacccatctcaactgcccaaagtgttgggattacaggcatgagccaacgcgcctggctggatatatatcattttaatgagtctatcttaattcaaaattgcagactataggaaatggaaatgttacacattttataccagtaaatatctcatgatctctatttttgttggttctttttcctttggatgaagctgctctatttggaaaggaacatataatgaaccatataatcagtttttctattatgttttacatttttttctttttcttttttttttttttttttttttgagacagagtcttgctctgtcacccaggctggagggcagtggcgtgatctcagttcactgcaacctgcacctccccggttcaaatgattttcatgtctcagccacccaaatagctggaatcacaggcatgcgccaccatgcatggctaatttttgtatttttagtagagacagcattttgccatgttggccaggctggtctcaaactcctggactcaagtgatctgcctgccttggcctcccaaagtgctgggattacaggtgtgagccaccgtgcatggccatgttttacatctttctataaaacaaagacttagcacagaaatgcactaggctctgtaccaaactatacagattctaaactgcagaggagaaaatttatacttaggtaaaaattaggatacatgcttgtgttacattttaattttgaaatatttcaaggccggcatggtggctcatgcctataatcctagcaatttgggaggctgaagcaggaggattgcttgaggccatgagtttgagaccagctgggcaaacatagcaagacccccatctctacaaaaaatttaaagtagctaggaatgttggtgcatgcctatattcccagctactcaggaggctgaggcaacaggattgcctgagcccaataattggaggttgcagtaagccacgatcacaccactgcactccagcctgggtgacagagcaagagaaaccctgtctcaaaaaaataataataataaaatgataaaataataaataaatttctgcgctgcagaggacactgtcaggaaactgagaaggcaagctacagactgggagaaaatatttgcaaaagacatatctgataaaagcatgttagccaaaatatacaaagaactcttaaaacaataagaaaatggacaacccaatttaaacatgggcaaaagacctgaacacacactttaccaaagaagtacagacactttaccaaaacaaatttttatatggcaaataaacatatgaaaaaatgctcaacatcgatatgtgttagcaaattgaaacaataatgagataacactacacacctattagaatgataaaaatccaaaaccttgacaacaccaaatgctgacaaggatgcggagcaacaaaaactctcattcattgctggttggaagacaaaatggtacagccactttggaagaagtttggcaatttctcacaaaatgaaatgtactcttaccatatgatccagcaatcatattcattggtttttacccaaatgatttaaaaacttatgcccgcaaaaaatactgcacagaagtgcttatagcaactttattcataattatcacaacttggaagcaaccaagatgtcctttagtaggtgaatggataaacaaacggtggtgcatccagacaatggaatattatttagcactgaaaagaaatgagtcatcgagccatgaaagacatggagtaagcttaaatgcatattacttagtgaaagaagccaatttgaaaaggatgcctattgtatgattgcaactatataacatactggaaaaagacaaaactgtggagacaacaaacagatcagtggttttcaagtattgaggagagggatgagttggcagaacccagaggatttttagggcattgaagctattctgtagaatgctataaagatggatatatgttattatacatttatcaaaacccacagaacattcatcaagagtgaaccttagtgtaaactatggactttgggtaataatgatgtggaatttgggtcaatgtgtgttcattgattataacaaatgtaccactctgttatgggctgtcgatagggagggaggctggtgggtgtgtgggcacagggattatatgggaactctctgtactttatgcttaattttgctgtgaacctaagactgctcttaaagtctgtttttggccaggcatgatggctcatgcctataatcccagcactttgggaggctgaggtggaagaactcctgaagccaggagttcaagaccagcttgggcaacatagtgaaatcctgtttctgcaaaaataattttaaaaattagctggatgtggtggcaaacacctgtagtcccagctatttgggaggctgaagtggtaggatcccttgagctcaagagttcaagttgcagtgaaccatgatcacaccactgcactccaacttgggcaacagatcaagaccctgtctcaaaaaaaacaaaccagaaaaaccaccaaaaaacaaaaataaagtctatgtatttatttatttattttgagacagagtctcgctctgtcgctcaggctggagtacagtggtgcaatctcagctccctgcaacctccagctcctgggttcaagcaattctcgtgccgcagcctcccaagtagctgggattaacaggtttgcaccaccagacctggctaattttaatgaagtctattttttaaaaaattgattcaagaggcaaatttaataaaattagtgattattaccattttatcaagaatattcttaacattcttaagtgaagctggatttaaagcattttttttctgcaagtgaatgatagtaaaacatgccatgactgctagtatagtttggtgacactgcatggatttggatttgtgttcaggtgccagcagttttacccataattgattttgcaccatcagtgaaaatgtcaccacaataacttcttagtattattatgaaaatagttctgactattttcaagaaggatcttagggacccatagggctcccttcaggagcttcattgatctttcccatgtatattttccatatacacacacacatacatatacacacaaacacacatacacacattatttaaatatattaaaccattataattgtttaatgtttttttaataatatactccttattctttttacaacttatattttttgtatttgaaatttatttgaaatttattcgagttgatgtatttagctctagatcattcatttcaactgttctggagtaaaacattgtttgataatacagacattcctcattttattgtgctttgctttattgctcttcacagatgctacattttttcacagattcaaggtctgtggcaactctatgttcaacaagtccgttggcaccactttttcaacagcgtgtgatcacttcatgtctctgtcacattttggtaattcttgcaatatcccaaacttcttattattattatatctgttatggccatctgtagtcggtgatctttgatgttattattgtaattttggggggtggcaccacaaactgcacccatataagacagcgaacttaataaatattgtgtgttctgactgtttcaccaactggctgtttccccatccctctctcccctttccttgggtttctctgttccctgagacacaacactattgaaattaggccagttaataaccctacaatgggctaaacgttcaagtgaaaggaaaagtcacgtctctcactttaattcaaaagctagaaatgattaagtttagtgaggaaaacatgtcaaaatccaaaacaggccaaatgctagggctcttgcactaaagttacctgagttgtgaatgcaaaggaaaagttcttgaaaaaaattactccagtgagctcatgaatgataagaaagtgaaacaggccctgtgtgatggctcatgcctgtaattccaaaactttgggaggctgaagtgggaagatcacttgagcccaggagtttgtgaccagtgctggcaacagtgagacccccatctctacaaaaaataaaaataaaaaaatagatgagcatggtaacacatacctgtactctcagctactcgggaggcttaggtgggggtactgcttgagctgggagatcaagactaaagcgaaccatagcgacacgactgcacttcagcctgggtgacagagcgagaccgtgtctcaaaaaagaaaaggaggccgggcgcagtggctcacgcctgtaatcccagcactttgggaggctgaggtgggcatatcacgaggtcaggagatcgagaccatcctagctaacacggttaaaccccgtctctgctaaacatacaaaaaaaaaaaaaaaattagctgggtgtggtggcaggtacctgtagtcccagctacttgggaggctgaggcagaagaatggcatgaacctgggaggcggagcttgcagtgagccgagatcacaccactgcactccagcctgggtgacagagcaagactctgtctcaaaaaaaaaaaaaaagaaaaagaaaaagcgaaacagccttattgatgatatagagaaagttttagtggtctgaagagaagattgaaccagaagcaaaattcccttaagccaaagcctaatccagagcaaggccctaactctcttcaattgtacaaagtatgagagaggtcagaagcttgagaagtctggctgggcatggtggctcatgcttgtaatcccaacactttgggaggctgaggtgggtggatcacctgaggtcaggagttcaagacctgcctgaccaatatggtaaaaccccgtctctactgaaaatacaaaaattagccgggcatggtggtgcatgcctgtagtcccagctactcgggaggctgaggcaggagaattgcttggacttgggaggtggaggttgcagtgagccaagaatgcaccactgcactccagcctgggcaacagagctagactccatctcaaataaataaataaaataaaaagaagttgcagaagtctgaagctagcagaggttggtacatgaggtttaaggaaagaagccagctccgtaacttaaaagtgcacagtgaagcagcaagtgctgaggtagaccctgcagcattatccaaaagatctagctaagatcatttatgaaggtggctacactagacaacagactttcaatgtagacaaaacagccttctattgaaagaagatgctatctgggactttcataactacagaggataagtcaatgcttggcttcaaagcttcaaaggacaggctgactctcttgtcaggggctaatgcagctggtaactttaaattgaagtccatcctcatttaacactctgaaattcctagggcccttaagaattatgctaaatctactctgcttgtgctctgtaaatggaactgaaaggcctggatgacagcacatctgtttatagcatgttttactgaatattttaagcccactgttgagacctactgctcagaaaaaaagattcctttgaaaatgctactgccggccgggcgcggtggctcacgcctgtaatcccaacactttgggaggctgaggctggtggatcacgaggtcaggagatcgagaccatcctggctaacatggtgaaaccccgtatttactaaaaatacaaaaaattagccgggcatggtggtgggcgcctgtagtcccagctacttgggaggctgaggcaggagaatggcgtgaacctgggaggcagagcttgcaatgagccgagattgcgccactgcactccagcctgggcgacagagcgagactccatctaaaaaaaaaaaaagaaaaaagaaaatgctactgccaattggtaatgcaatgcacctggtcacccaagagctctgatggagatgtacaaggaaattaatgttttcatgtttattaacacaacatccccattctgcagaccatggatcaaagagtaattttgacatttaagtcatgttttaagagaaacattttataaggtatatttgccttagtgattcctctaatggatataggcaaatacgttgaaaactttctggaaaggattcaccattctagatgtcattaagtacatttgtgctttgccactgctgaatcagtggctcagctatgtgcaagattaggcttcatctgtaacccaccaccgtggctgaggaagccattgctgctgaaggtgtaatggatgttaagaatactttataaggttgaggacagtggctcatacctgtaatcccagcattttgggaggttgaggcaggaagatcatttgagcccaggagttcaagaccagcccgggcaacatagcaagaccttgtctctacagaaaattaaaaaattagcgaggtgtcggctgggcacggtggctcatgcctgtaattccagcactttaggaggccgaggcaggtggatcatgaggtcaggagtttgagaccagcatggtgaaactccgtctctactaaaaaaataaaaagattaaccaggtgtggtggtatgcacctgaaatcccagctactcaggaggctgaggcaggagaatcacttgaacctgggaggcagaggttgcagtgagctgagattgtgccactgcactccagcctgggggtgacagagggagactgcgtctcaaaaaaaaaaaaaaaactatctacaaagaatctacaaagaacttaaacaaatttacaagaaaaaatcaaacaaccccgtcaaaaagtaggcaaagtatgtgaacagacagttttcaaaagaagacatttatgcagccaacagacacatgaaaaaatgctcatcatcactggccatcagagaaatgcaaatcaaaaccacaatgagataccatctcacaccaattagaatggcgatcattaaaaagtcaggaaacaacaggtgctggagaggatgtggagaaataggaatgcttttacactgttggtgggagtgtaaactagttcaatcattgtggaagacagtgtgacgattcctcaaggatctagaactagaaataccatttgacccagcaatcccattactgggcatatacccaaaggattataaatcatactactataaagacacatgcacacatatgtttattgcggcactattcacaatagcaaagacttggaaccaacccaaatgtacatcaatgatagactggattaagaaaacatggcacatatacaccatggaatactgtgcagccataaaaaggatgcgttcatgtcctttgtagcgacatggatgaagccggaaaccatcattctgagcaaactatcacaaggacagaaaaccaaacactgcatgttctcactcataggtgggaattgagcaatgagaacacttggacacagggcgaggaacatcacacactggggcctgtcgtggggtggggggatgggggagggatagcattaggagaaatacctaatgtaaatgatgagttgatggatgcagcacaccaacacagcacatgtatacatatataacaaacctgcacgttgtgcacatgtaccccagaacttaaagtataatatataaaaaaaagaaaaacaaaaaagaatgaaaaaaaaattagcgaggtgtcatggtgttccagctactcaggaggctgaggtgggaggattacttgagcccaggagtttgaagctgcagtgaactatgattgtgccattacaccccagcctggtgacagagcctgtctccaaaaaaaacaaaaaaacaaaaaacaaacagtttcctaagaggcgctgaagacctccctcaagcatgatgacctattacatggaatttgcaaagctgccaaaaccttagataaggctttgtgtgcttgcatccatgtgtgatgagcctgtgtatgtcacgttggtggaggcccttagtgcttaacaccgtatcaccctaattaaggttgaccagaaagtaggcgaatgggtaggcttctgtaaaattgacagaggggggaaaaccctgtaaagtggttggttgcagttgtgtagtaggtaaggactatggcaaagaatctcaagccaaagatgtcatcgaagagtacttcaaatgcaagaaatgaaccaataaaactacagctcatgctcctcgaggaaaaaaaagaaaattcgtgattcatgagaggaggtcaaaatatcaacattaacagaagtttggaagaagttgattccaactctcatggatgactttgaggggttcaagacattattggaggaagtaactgcagatttggtggaaatagcaagataactaaaagagagagaattaatagttctaccctaaacagaatgcagtggtgggcacctgtagtcccacctacacaggaggctgaggtaggaggatcacttgaggccaggagttcaagaccaacctgggcaacatagtgagatacagtctcaaaaaaaaaaaaaaagtgaagaggagttgcttcttatggatgagcaaagaaagtggtttcttaacatggaatctactcatggtgtagatgatgtgaacattgttgaagtaataacaaaggatttagaatatcacataaagttagttgataaagcagtggcaggatttgagaggattaactccaattttgaaagaagttctactgtgggcaaaatgttgtcaaccagcgctgtatgctacagagaaatcttttgtgaaaggaagagtcaatagatgtggcaaacttcattgttgtcttattttaagaaattaccgcagtcactccaaccttcagcaaccaccaccttgatcagtcagcagccatcaacgtggaagcaagaccttccaccagcaaaaagcttatcacgctctgaaggctcagatgattgtgagcattttttagccataaagtatttttaaattaagttatgtacattttttagacatcatgctattgtacacttaatagactacagtataatgtaaacataacttttatatgccctgggaaacaaaaaattttgtacagctcactttattgcaatatttttattttgcaataaagcaatatttgctttattgtggtaacctggagctgaacccacactagctttgaggtatgcctgtactatagtttctttaacctgttcccttactgatgtcattttgttccagtttggagctattacaaacaacgttgcaatgagtactcttgttaatgttttcttatgcatatgtgtaaattttctctagttatgcttgggagtggattgatggatctaggttatgctcatcttgaactttattctatagggtatacaatgtgccagacattattctaagcacacaatataaatataaatatgtaccttacaactatcctttgagataaatattattttccctattttacagattgggaaactaagacacagagagattaagtgacccacccaaatcacatagctagtaagtagcagatccaagcaatttccaaaatccaggcttttaccaccacatcatgccacagcatgatgctttacactttgggaatgaatgcatgtattttcctgcggtatgcttatctaatctcttcaattcttggttctttttcaaagtttgatgtggttaaatcaaggaggaaaatattcactagaaatattatcatcataaaaaatgtgaatatgatcaacgtgagccaccaccttgactttgatcaatagtcaggaaactaaactatcaatgttcttccccttttgaagaaattatattgcattttttgatcacataactactgagggttttctattaaaaaataaaaaatgggctgtgtgcggtggctcacgcctgtaatcccagcacttttggaggccgaggcaggcagatcacctgaggtcaggagttcgagaccagcctggccaatatagtgaaacctcatgtatgtctaataaaaatacaaaaattagccgggcatggtggtctgcgcctgtagtcccaactactcggggggctgagactggatcactttaacctgggaggccgaggttgcagtgagccaagattgccccgctgcactccagcctggacaacagagcaagaccctgtctcaaaaaataataataaaataaggccagacgcggtggctcacacctataatcccagcactttgggaggctgaggtgggtggatcacctgaggtagggagttcaagaccagcctgaccaacatagagataccgtgtctctactaaaaatacaaaattagccaggcgtagtggtacatgcctgtaatcccagctactcgggaggctgaggcatgagaattgcttgaacccatgatgcggaggttgcagtgagccaagattgtgccattgcactccagcctgggcaacaagagtgaaactcctctcaaaaataaataaataaataaaatattaaaaatgaatctaaaatataattattttataatagctaaaacttcctgttctggaatgtagcttaatatttcagactactgattgtatcatacattagtaataaagattaaaacaatgttctaaattatggaaaatgaggtaaaggagaaaaaattaaaaaaaatagacctgtatacagagttatagaagtaagctgttatttctgtgcatagtttaatgctggttggaaatttcagactgctacaagagtgtaagaatttttttcaatcttactgctaagttagggttgcagtcaaattaatttaaagtttgttatagatcttcgtgggggaaaaaatgaaggaagataaatgtttgtgttttttttttccttctgtaagttcttcagctaaaccagctatgctgcattgtatgggtggatttaggatgctggggatccctcaccatttttttaaaaaataaaatacacccattaagtatcatttatttagtctagcatgtgggatgtgaagcatttcccacagaagtcatttgtctctgtctgtggataggccttcctagggaacacttaatgagattgctttttctcctgactcctttaatgttttgtttgcagttcctaaatccaaattataaatttatcttgcagtattatactttctatgatgatgaacttcttactgacagtaacaatcaactgccatcattgttttgcttccaaagaaaaacagtctttcaaaatgcagacattttaatcattcagatataggggttgtgaaacacaaaaatataaataatgaacaatggaaaatatttattaaagtatattagaaatgtatagatccatattgtcatgtttagttggataacatcagaaatttgtatgggcaagatatataaaattattttatttcctataaattaaattaaatctgactttgaattgcccaacctggtaaaatatagattcatatcagtcattatgggaacacatagaaaagaatatgtctttcttcctttccttccttggtcctctccaacccaagagtagcgcaaaaacctaagaatcttttaggaaaaaagaaaacaaataggagatgggcccacttgtctgcagttatcaccatcatggactgatacccttattgaataagttctgcttcaagtccgatgacattattgcttttctggtcaagcttggacatgagagtctctcttgattgtgaacccccagtaactacagtccagcctcccaaggtactccatccagccattcttctttgaggtcttgccatttccttggagaacagccaggaagtaggattcaggtcacaactatccctggtgttgctgaacatttttccaatttgggcaagctgggtttagcaggctatttcccagtctcccttacagttctcaaagcttttgcctttatctcaagcttccagaaaatgaaagtttgaaggcagattatctacaaataacttctgctttccagtctgtaactcagatcttctgtaaataatggaacctgaagacctggttacctgtttaaatgaggaaagggaaaaagaagtggagaacaaatgaaaattaaaatcttatattgtcctgccacactgacatgcacacccacagacataaacgtaccacttttctgcctaatcccagcttctgggttgttcagtttttattgagttcttagaaggaagagggcctagaaaattatagattaatctgtatttgtgaataattgagaactcactaataaaatgggcaccttggatattatgtttacttcttgttgtaaaaaacagagtaaagctttgttacctagggttctcccctcttcccctgccaattattagaaaagtaatctaatattttccaaataaatatataattgtggaggactttcaatagacactaaagaatagcaaagtaacgcagatctataatgaaaccagatctgatagtgttattacttttacttgaatttgaaataatttcaaaaagagccagaaattattattgagatctatactattctgaaagctgagatagagaagaaagttgaatacatgtccactaccctcttgcagatagtgaaaaatgtgtgaataaatttataattatgacataataaataaaaaaggtactatgaaagtatagaagttgaagaaaagaagttgaagtctttcttatataatattttgcttagcagggttggcatgtactatcatctttatttgccagatgaagaaatttgagttgaaagaggttaagtatcttgctcagttacacagaataagtggtatagtagtacattcttaatgtataagtgatcagaggctggggaaatgatttctaacaagggtaataatttttataatactgcctgatatttttacactttgaatctgatttataagattgtctttctacctacttgattctgcaaagaatttgaaagttcttctcataggcgaatgactatccttgtcttaaattatctgcttatctagaagatatctgcaaaataacttgctgggattttggttggggttgtgttgaatttatagatcaaatgggaataactggcatcttgacaatattgagtctcccaatccatgaatatgaaatatttctccattaatttagttctttgatttctttcaacagagttttgtagttttccttatattagatctcatacatattttgttagatttatacctacatgtttcattttggggggtgctaatgtaaatggtgttgtagttttaatttcacattccccacttattcattgctggtgaccaacatggagaaaccccatctctactaaaaatacaaaaaaaaaaaaaaaaatcagccggatgtggtggtgtatgcctgtaatcccagctacttggggaggctgaggcaggagaatcgcttgaacccagaaggcggaggttttggtgagccgaggtcgtgccattgcactccagcctgggcaacaagagtgaaactccatctcaaaaaacaaacaaacaaacaacaaaaaacaacaaacaatttctcctatagttttgtataattccttgttggttctaggggttttttgactctttcagattttctacatagttatgttagttttctacatgttacagttttatttcttccttcctaatcagtataccttttaattctttttcttgtcttattgcattaactaggacttcaagtacaatgttgaaaaagagtagtgagagggaacatccttgccttgttcctgatcttagtaggaaagcttctagttgtttaccattaagtgtgaagctagctgtaagtcttttatagatattctttattaagttaaagaagttgccctctatttctggttaactgagagtttttatcattaatgcgtgttgaattttatcaagtgctttttctgcatcttttgatatgatcatgtaatttttcttttttagccttttgatatgatagattacattaattgatttttaatgatcatcagatgcatcaattttgcatatctgagataaatcccacttttttgtaatgtataaatctttttatacattgttggatttggtttgctaatatttagatgaagattattgcccctttgttcctgaagatattggtctgtagtttttttttcttgtaacatctttgttgggcattaaagtaatggtagtctcatagaatgagttaagttagccactgcacccagcctatttcccttttttaatttttaatttttgtgggttaataggtgcactaattaattaatagatgtattaatttttattaatagaatgagtaatggtagtctcagagaatgacttctatcttctgaaagagactgtagagaaatagtataatttatgccttaaatatttggtagaattctccagtgaacctatctggttttggtgctttgtattttgaaaggttattaattattgattcaatttctgtaatcaatttagacctattcagatagtttaattcttggcagattgagtcttgcaaggaattgattcatttcatctaagttatcaaatttgtatcaattaatttgtatcaaattaaaaatcaattaatgtaatgcatagagttcttcatagtattacttttattatcctttcaatgtccatgggatctatagtgatgtcccatctttcattcctgacattagtaacttgcatcctctccttttttcttagttagcctggctagaggcttatcgattttattgactctttcaaagaaccagcttttagttccattgattttctctattgatttcctattttcaatttcattgatttctgctctaatttttattatttccttcacccaggctggagtgcagtggcactgccagggctcactgcagcttcaatctcccaggctcaagtgatcctcccacctcaacctcccgagtacctgggactacaggcgtgtgccacctgtccagctaatttttgtattttttgtatagacagggttttgccatgttggccactctggtcttaaactcctgggctcaagtgatctgtccacctcagcctctcaaagtgctgggattacaggtatgagccactgtgcccaacccatttcccttttttaatttttaatttttatgggtacatagtaggtatattaatttttattatttatttccttctgctttctttggatttaatttgctcttctttttccagtttcctaatgtggaaacttaaattatttattttaaattttttttctaatatatgcacttaatgttaccaatttccctttaagcactgctttcactgtattccacagattttaataagctgtgctttcattttcatttagttcaaaatattttaaatttctcttgaaaatttttctttgattcatgtgttatttagaagtgaattgttggccaggcccaggggcttacgcctgtaatcccggcactttgagagactgaggcaagtggatcacgaggtcaggagatcgagaccatcctggctaacacagtgaaaccccgtgtctactaaaaatacacacacaaaaaaaaatttagtcgagcgtggtggcacatgcctgaagtctcagctacttgggaggctgaggcaggagaatcgcttgaacccaggaggcgaaggctgcagtgagccaggatcgcgccaccgtactccagactgggagacacgatgagactccatctaaaaaaaaaaaagaaagaagtgaattgttttatctccacatatttggggattttccaattatctttatgatactcatttctagtttaattctgctgtgatctgaataagacattgtataatttttattcatttaaatttcttaatgcatgttttatggcccagaatgtggtctatctggatgaatgttccctatgagtttgagaagaatgtgtattctgctgttggatgaagtagtctgtagatgtaaattatattcagttgatggatggtgttgttgagttcaactatgtccttactaattttctgcctgctgcattttgtccatttctgagagagggatgttgaagtctccaactatagtagtggattcatctctttgtccttgttgttctaccagtttttgcctcacgtattttgatgcactcttactagaaacacacacttaaaggattatcatattttcttggggaattgactcctttatcattatgtaatgcccttcttcagccctgataacattccttgctttgaaatctactctgtctgaaattaagtatctacttctgctttcttttgattagtgttatcatggtatttttctctattttctttcatctatatgtgtctttatatttaaagtggatttcttgtagacaacatatagttgggtcttgtttttttaatccattctgacaatcatttaatttgtgcatttagactattaatgttcaaagtgattattgatatacttggattatttaccatatttgttactgttttctatttgctgccttgttctttgtttctatttttgtcttctactctttttctgctttttttttttaattttttttgagacagagtctcactctgtcatccaggctggagtgcagtggcacgatctcagctcactgcaacctctacttcccagattcaagcaattctcctgcctcagcctcccgagtagctgggattataggcacccacccaccacgcctggctaatttggtattttagtagagatagggtttcatcatgttggccagattgatctcaaactcctcaccttgtgatctgcccaccttggcctcccaaagtgctgggattacaggcatgagccacccggcctgttgttttaatttaatattttatgcttcagtttcctcttttttagcatataaattatgcttctttttatactttttttttttaaggcggggttttgctcttgttgcccaagcaggagtgcaatcgcatgatctcggctcactgcaaactctgtgtcctgggttcaagcaattctcctgcctcagccttctgaatagctgggattatagacgcccaccaccatgcccagctaatttttgtatttttagtagagatggggtttcgccatgttggccaggctggtcttgaactcctgacctcaggtgatccgcccaccttggcctttcaaggtgctgtgattacaggcatgagccaccgtgctgagccactttttatacttcttttagtggttgctctggagtttgccatatacagttataagtaattaaagcccactttcaaataacactacaccatttcactgatagtgtgagtgtattataataataaaataatcctaactcctacctcccatcccttgtatcattgctgttatttattttacctatatataaacatattcttaagcatatggatatatatacacacataagatacatacatatgcataatcaaatgtattgttgccattattatgaacaatctgttaggtcaattaagaataagaaaaatacaaggtttaatttttatcatcacttatttcttcttttgtgccctttttttttatgtgcatctaagtttctgacctatatcaattctttctttccaaagaatttcttttaatatttcttgcaaggcaggtctactaggaacaaatttcctcagtttttttgtttgtctgagaaagtctttatttctccttcactccccactgccgctcaccaccccgccaaccccacactgagacaggttctcactccatcactcaggctggaatgcaatggcatgatcatagttcaccataacctgaactcctgggctcaagcaatcctcctgcctcagcctccttagtagctaggactacaggtacacaccgtcacacctggatatctttgtttcctttttgtagagacaggctcttgctatgttgccctgtctggtcttgaactcctggcctcaactgatccccccatagcactgggatgacaggtgtgagccaccatggctgacctctcctttgcttttgaaggaatattgcagggtacagaattctaggtgggtggtttttttctctcaacccttttttcactctgttctcttcttgcttgcatggtttctgaggaaaagatagatacaattcttctctttgctcctctgtaagtaaggtgttttatttttctggcttctttcaagatttcattctttatccttgattttctatagtttaaaatgatattcctaggtacaaggtttttgtttttgttttttgacatttattcttcttggtgttctctgagatttctgggtctgtgatttggtgccaagacattaccttggggaaattcttagtcatttttctttctttctttctttctttcttttttctttttctttttttttttttttttttttgagactggagtgcagtggtgctatcttggctcactgcaaactccacctcctggattcaagtgattctcctgcctcagcctcccaactagctgggattataggtgcccgccaccacacccagataatttttgtatttttggtagagaaggggttttgccatgttggccaggctggtcttgaactcctgacctcaggtgatccacccgcctcgttgccccacagttcttgagtattctgttctgtttttttcagtccttatttgcttttcagttttggaggtttctattgtatatcctcaagcttagaaattctttcctaagccaagtccaggctactaataagcccatcaaaagctttcttcatttcttttacagtgttttttatctctagcattcattttggctctttctttagatttccacctctctgcttataccgcccatctctttttgcatgttgtctacgttatccattagagcccttagcatattaatcatagttgttttaaattcctggtatgataatcccaacctctccaccatatctagttctgatacttgttctgtcttttcaaaattttttttgcttttagtatgtcttgtaattttttcttaatagccagacatgatgtatagggtaaaaggaactgctataaatagccctttagtaatgtggtgataaggtatgtagttaggggaaactagtcctgtaattagacttcattcttttagtgaggctgtacttatggactgtgagcttcacatattgttctcagggttggttttgttttttcctccaccttaggtgggacaagaaggctagagtgagctggagatgggtattgcccttcccctaggtcagttaggctctgataaaccccatcacattagactctggttagctagtttcttctgaaagaagaccttattaagaagaacagggtgctctgccgcatttcaacatggttccttttcccctcctcttgccagattcatgaggggatttttttctgatactcactgtgatgacctggtagagctcctggaggtgaaactcacaaaagtgtggggagcccctctgactgggtcttcctggagtttttgactatcagacttctacacctagtctccagcagtttgtcaattacagttcaggttttcttaccctggaattggttcctatggaggtgtctgatgggtatgttttataattctctgtatacacctgtccaattttaggagcaactgtgacctcacttctcttaagaatctaagaagtattgttggttttgcagtttgcttagctttttacttgttgttaggttggagtggccacttccaagcttcttacaagtggaaccaaagctggaagtcttccctctattgttaaaataattctcttcaaatttttttctctttattttaattgtaacacaggaataggggataacatttaaccaccatttgtgtactacagaatagtcagggccatactaaagattggagtaggccttaggaccagatgaaataagcatctggttatttcatgatttcatcatgatttcaaagggtcagttgaaggcttttcaggtgcatttaaaagtatctctactggttaataagaataatatctaaaattgtaacactagaggtttatttctttggtttattgttcttgttaaaatgcagataaccctgaagcgtttttcttttgtacgtttttaatataaagtcattcattcattcaacaaatacttattgaatgcctactgtatactaggtgctgttctgggtgctgaagataaataagtgaacattattgattgagtccttgtggagggcaagagtgagatagacattcattcacaaataaataataagaaagatgttaagaaggtactttttttaagagagtgagtgttagaaacaagagctcagagtcgcaaggaaaacaagcactcaaaccatttctcagcaaggcaaatttacttgtgcagaagggtgccgcttgcacttctggcctctgcgagagcacaccaaacaaaggagagaaggattttttatccctaacgcagtccctatccctgtgtccttcccctattggctagggttgaactgtacaatctaagctgaccctggttggctaagacttaaacttttccaattagggtaaacacacgatttgcaagggagggagggggtaggagtggtcccgctgctatagcacaaggtatgttcggatatgtctgggcaagtcagggcacaacaagagcgggagggctgcttgcaggctagaaacaagatagtacaaagaagtgaggcctccaaaccaaggacaaggacattacacaattaaaccctttgaagaagaattcactatctctggcagtgagtaagaaaatcctctctaatgttacatttaagcagagacttgaaggaagtgaggatatgaaccatacgactgtctgaagaacatttgttccaggcagagaaaatgatgcaaagtgcaaagggcctgaagtaagtgcataattggtatgtttgaggaataacaaggaggccagtgtgactggagtggattgaggaaagagtagaattgtaggagatggtcagtgtgacactgtgatttataataagaaataatacatttggtcttcctcaccatttcctgacatacagcttctaaaactcttagaacctccgaaatgatgtgtctttttgtatgataatgagacgaatgatggctggtggctcctagttagcctcaggatgggggtgctggttgccaggagaacggaccatgtgattaaaagattgaaactttcagtcatacttccttcaacccctacatccaggaaagggagaggagctgaaggttgagttggtaaccagtggctagtgatttaatcaatcatgcctatataatgaagcctttgtaaaaacccagaaaggactgggttcaaagagcttcttgtgctgaggagggtagcacacctttaactccacagggacagaagctcctgtgcttgggaccattccaaatatcaccctaagtgtctcttcatctggctgttcatttgtatcctttaaaatatcatttgaaataaattggcaacagtaagtaaagttttgcctgagttctgtaagctactctagcaaataaattggacctgaagagggagtcatgagaacccctaatttatagtgagttggtcattctacatatctccaagtagatagagtcagaaatgattgaattatagggcattcagttggtgtctgctggagaattgcttgatgtgtggggaaaacccccacaacatcttatgtcagaaataatgtgttgagtgttgagagtaggaaaagtgtttgatttttcccatgtcctacagttagcaaggtaataagtgagtttataaggatctaggcttgagcagacttaaaaaaaaaactttttaattttggataattttagatgtacaggaaagctgctaagataatatgataattacccaatgggttcttcttgcccactgcacagagagagctgatttactgagacagcagtattgcaatagcgaagtagtgtaataaacgtagagccagctgagcagaagacaggagtttattactcaagtcactccccctgaaaaattcagagattagggtttttaaaggataatttggcagcagggggctaggggactgctgactggttgagttggggatgaactcatagggaatctaagttgtcttcttactgtcttcacttcctgggtaggattgcaagaccagctgagccagctttacctgtctgggtggcaccagctggtccatcaaaatagagagtctgaaaaataccccaaacatgaatcttaggttttataatagtgatgttattcataggagcaactgaagaggttacaaatcttgtgacctctggctacatggcttctgaaccacagttctaacctcctggctaatttgttagttttacaaaggcagttttgtttcctgagcaaggagagtgttatcatctttgttttaaagttaaattaaattcctcctatagttcctcctatagttcattccgcccaggaatgaacaaggacagcttggaggttaaaagcaagatggagtcagttaggttagatttctttcaccatcataatttttccatgtcaaatttttctcactgttataatttatgcaaaggtagtttcaatattaccatctacctcttaccatttcccctaattttaacatcttacattatcatggtgtgtttgacaaaactaagaagccaaccagcatttgttcattactgttaactacattccagacttaccttgtatttcatcagcttttccactaatgtcctttttctgttctaggatccaatccaggatactacattgcatcacgtttatttattcttttgcagtctgtgacagttgctcaatccttccttcttttctatgagcataacagtcttaaggagctccaactggatgctttataggatgtttttcaatttgggcttatctcataatgttttccaaaagactagactggggttatgggcttctggaaagaataccacagaggtaatatacccttctccaggaggtagtgttaacccccatccccagtcttgagtgtgggctgactcactttctaaaaaagaatatggagaaagctgacaaatgctaccttaaccaagtgatcaaagttaatatcaccaccagtgatattatgttgatatgatgtggtgagtccagcaaattttgatgtagagataacatgtgaataggacctgattttagagacatctttgcccactttacaattttccatagactaaactcattaaaaagtacacataatctatagcaaagttattttaagtcgagatttttgacatttctccttatcttccataattatttattacttagtacccaggattgttattttcattttgtagtgtccatatgggggagaggaaaagagagagaggaagagagaaggaaggggcagactttggttgttttgctgcttttgtaataatccacaaatacatcctatcagtggttgtaattgttaccggaaaggggtcccagtgcagaccccaagagagggttcttggattttgtgcaagaattcagggcaagtccacagtgcaaagagaaagcaagtttattaagaaagtaaaggaataaaagaatgactaccccatagacagagcagccttgagggctgctggttgtccatttttatggttatttcttgattatatgctaaacaaggggtggattattcatgcctcccctttttagatcctataggataactttctcatgttgccatggcatttgtaaactgtcatggcactggtgggaatgtggcaatgaggatgaccagaggtcgctctggttgcaatcttggttttggtgggttttagccaccttctttactgcgtcctgttttatcagcaaggtcttcaagacctgtgtcttgtgccgacctcctctctcatcctatggcttagaatgcctaactgtctgagaatgcagcccagtaggtctcagctttattttacccaacccctattcaagatggagttgctctggttcaaatgcctctgacacaatgaccaaagactatattgaatcatgtatggtcagtagattgttagtttgtaaaagccctgaattttacatctttataattcccattcaactcagagctggctatattaagtgccatttttatagccaaatagttttatttttgttgcatatttaagggatttttcaaatgtttttctctattaaaatgcattgtagcttacctactttgcaatgtggaatggaattaatgctgaattagtagatagaaaatttgtgttctaggtcccaccccattacttcctaaatataactagggctaattcacttaactcaattttctcatctataaaatgggtacaatcatacttcatctttacctatgcctactattcagcatgcattcttagagtttttccatttaaattgtgttgtggtttttcttatttgtttgagacagggtttctcgttatgttgcccagtctagactcaaactcctgctctcaagtgatcctctcacctcagcctcccaagtagctgggactacagacacattccactgcatttaaatagattttaaaggccattaaataatttggaaaaaaataatttcaagcatagcattcctaacaagtaagctgctattagctgctccttacaggttgttgtaaagtttaaaagacagcgtgtacataaagacaatgtctagcacataataaattttgaataaatagaaagtaataggatagaggtagaattttctattgtcctgtttccctgatcccatttaagtaaatatttaattaattcttgtacattctccacaggcctttgcttatgaattcctgtcagtaagaaattatagcttaaggatgagcttgctgtcatttaaaaaaagaaagtatagccccgcacagtggctcacacctataatcccagctactcaggaggctgaggctggaggatcgcttgagcccaagaggttgaggctgcagtgagccatgatcacatcactccactccagcctgagtgacagagcgagaccctatctcaaaaaagaaagaaattatgacagaagctaactaatcagatgttagggatattatagagagaatccctacctgtaaattgaaagttggccagatgacttctgtggttccttccaattctatgattttgctttaatacatatagtacctatctctcagggtttaactgagagctttaagggctgagatagtatatgggaaaaccatttgtaaacataaagtactatacaaatatgtggtattattatataagactagtaaactagtcaacagagattccctcagtaactgtaagaactatctgtggtggggcacggtggctcacacctgtaatcccagcactttgggaggccaaggcaggtggattgcttgaggccaggagtgtgagaccagccgagccaacatggtgaaaccccgtctctactaaaaatacaaaaattatccgggcgtggttgttcatgcctgtaatcccaactactcgggaggctgaggcatgataatcacttgaacctgggaggcagaggttgcagtgagccgagattgcaccactgcactccagcctggggaacagagcgagactctgtctcaaaaaaaagaaaaaaaaaaaaaactatctgtattcattgaaaattaaaagatacacataatgtattgaggtgttttttgttttttgttttggtgaggcctagaatttattatattataatcgttgccattgtttgttatctatttatgtttgttttcttagctaagaggattgtagcacttttttatgtagcatacattctcctatttcttccattacatttactctgtgacagtttttcctaaggcaatgcccagatgtgttgtggttaaggttataattcagcatttctatcaaggagacatctttctgaaaactatttggaaatagacagtagctctctgcaatcaaattcactcagcttgatgccactactcttggtttaacttaagcagcacagaaccaattttatggtgaattcagaagagaagctattgctggaaaataaaatgactttgagcccttctatagtatttatctactgccaactatttcttctcctcattattagaatagtacatactttgtactgttgtgattcttctgtgtagaaaaaagttttataactcattttgttttttttagttttgtcatttttcatttactgaccagatcagatcttttcaaagtcaaactataattttattctttagttccctatggagtagcatttaaagaaaatcatggtaaattactctattcttagttggaattttattttacagctatgaataaaagcattttcctagatattttccatagaattcctgaaaatagtttctcagatctttctcagtattaaaagtcaggctgagattctcattttgtccctagttgctgtaattttgttacttcccccatcagcattcccatttcttttaatttttaaaattcttttggtttattttctgagtttaacagtggggaatccatttgactgtgctcacagcaggtagtaagtactatggtagacactggattggtttctttggatggttaaaagaataagagggtaattaagcttttctgaagctgccaactgtattggaggtttggtgtacatttaaggcttatttaaaaatagttccttcagaaactgaacatttaaccagtagaattcctaagggcatatcgtttttatcaggtagcgattacttagattactagaatttgtgtcaaatagatttcctctttcatataagactaagtctaatgctgtactatctcattctgacttgtaatgttaatttatgatctttagtagggtgctttttacctaccataaactcccaaatatagctttttaaaataatgtgtgctttaaaaatacatgcatcttgtaatcctagcactttgggaggctgaggctggtggattgcctgagctcaggagttccagaccagcctgggcaacacggtgaaaccccatctctactaaaatacaaaaaattcgccgggcatggtggcatgcacttgtagtcccagctactcgggaggctgaggcaggagaattgcttgaaccctggaggcagaggttgcagtgagccgagatcacaccactgcactccagcctcggtgacaaagggagactccgtctcaaaaaaaaaaaaaaaaaaaaaaaagcttctaaaaaactgaatagaaacgtttattcagttacttttaaagatgcagaattagccaaagctttgcttcttgaactcaaaatctaaatctagataaaatgcagaaaagggattgcttttatgagctacagttatgaggtctaaaattttatctacataagctgggatgttgacatgtttaaaaccccaaacattctgtactgaaccataaatggaagcagagctatagtctccagagttgtaattttcccagtggtttgattcagagtactttgaaaaggtaatttaaatttaaatttgaaagggagaaatgcctaaaggttttatggctctcagaagataatggataggaatagtcattgtatgtgagagaaggaagaaaaccataagagaaatgtggcatttagaaacatgtactaaacctggtggaagaatagaaattgatagatggaaagaggtgatgtagggaaaatatacagtcattgaacttgagagttcttgaatagttaacattcagctttcattctattcatttaataaatatttactgagtaccttctgtgtgctttttggcaccgtggttttaagcagataagtgtcaatgacataactaattttaaactttctgttttgaaaccattttagatttacagcgagttgaaaagatagaggctgggcacggtggctcacacctgtaatcccagcactttgggaggccgagatgggaggatcacctgagatcgggagtttgagaccagcctgaccaacatggagaaaccctgtctctactaaaaacacaaaaaattagctgggcgtggtggtgcatgcctgtaattccagctacccaggaggctgaggcaggagaatcacttgaaccagggagggggaggttgcagtgagccgagatcacaccattgcactccagcctgaacgacaagaatgaaactctgtctcaaaagaaaaaaggaaaaaaaaagatagagagttctttctcccaggtgctacatgattgtggtacattactcaaaactaagaatttaccattggcactgacagttttaaaggacatatcttatctggcacttgctggcagaataaactatggggtcaggggagggcagggtagaagcagggagatcagttagtagttgatgacattaatccaggggaagcatagtaatgatggtttagactaggtgtttatctataaaagtggtaacaggtagtcggattttgaaaatagaaccaagaagatttgctgatggattggatttgggatgtgagataaacagaggaatcaaaatgactctaagatttttggaaaggagtcatttctaaaaatggaaaatgagttttagcactaaacttactgtccttccttccacaccaaccttactgcctttctctccacaactctttaaaagttttagttatttcattatctacacagacaatcctccaatgctcagatatctctgtttcttgacctcctcacctccagtgatcttgtcttccacctcaatttagtcacctgctcataagatcatcctctaggctatgtcgttactaataactaaaccttcattttaagcattctactctcctcccacaactcctgtctttccagccctctccctgtagtatatggacttcaacaattttaactccaacaggaccttggatccattttctctatgatcttcactaccctccttccttggcccattattaaaatgaggcaaatggaaaactagagttactatttgttgaaataaggaagtttataggagaaatgggtttgatgaaaaggaggttgagaattaggattttgttttaggacaaataagtttaataagtttgaaatgagcattagatatccaagagcaggtacttgaatataagagcctagtgttcgaatgagaggtttggaccagaaacatacaatgggagtcatcagcatatagataatacataaagatatgagacatgataaaatctattaaatggatagagatagagaagaggtcaaggactgaaccctgggcattaccatttttagagatcaggaaaagagaaaccagtgaacaagatcaaaagaagcatctaatgaagtagaaagagaaccaagagaagtggtgacctaaaagtgaaacaaaaaggtttcaaggtggagaaaaatgatcatttctgtcatatactgctgatagtccaaataaaatgaagatgagaattgacagttggatttggcaacatggaagccattgtgactttaataagagcagtttcagaaaagcactgagaattagagcctgaatggaatgagtttaagagacaatgggaataaagaaggtagagacagcaagtacagattgctctttcatgtttgattgtaaagggcagcagagaaatgggactttgactgaggaggtgaaatgttggtcaagaaacctgtattttaacattggaaacattgtatgctgatggaaatgactagtagagaggggtaattgataatgtaagagaaagacagttacaggttggtgagaggggatagaatccagtagatgtggctaggtgcagtggctcatgtctgtagtcctagcactttgggaggctgaggtgggtggatcacttgaccccaggaatttgagaccaggctaggcagcatagtgagactccatctctacaaacaaacaaacaaacaaacaaaaaacaacatctgggtgcctgtgaggtaggaggatcgcttgaacctgcctggttgaggctgcagtgagccgtgatcgtgccactgcactccaggcttgggtgacagagtgagactctatctcaaaaaaaaaaaaaaaaaattcagtgaatcagtagaagagatggccttagataggattatggacagttttaccattgtgtaggaagaaagagtgtggccgggcacggtggttcatgcctgtaatcccagcactttgggaggccgaggtgggtggattgtctgaggtcaggagttgaagaccaggctggctaacatggtaaaaccccatctctactaaaaataaaaaattagccgggtgtggtggcacgcacctgtaatcccagctactcgggaggctgaggcaggagaattgcttgaacccgggaggcagaggttgcagtgagccgagattgcaccactgcactccagcctgggcaacagagcgagactccatctcaaaaagaaaaaaaaaagaaaaaaaaagagtgtatgggtacagatgcacatattttagtatatatttagtatgatgagagcttacgtgagttataatttctatttttttcaatgaggagagggagggagaagagttgatttttttttttttaatatagtaaggtaagtaacactaaaggctcatttaacgttagtagtaatgaattaaaggaagccaagtcattatgtttgagttttactttggtcacattcagctgtctgaatgctgcagtggcacgatcatagctcactgcaacctcgaactcctgggctcaagggatcctcccacctcagcctcccatatagctaggattacaggtgtgtgccaccacatctggctaatttttgtatttttttgtagagatgggatattgctatgttgctgagactggtcttgaactcctggcttcaagcaatcctcctacttcagtctcctaaagtgttgggattgcagatgtgagccattgagcccagcctcttaccttattctttttaatggctgcattgtattccattgtatttcacctgtgccctattgagaatttttttttattattatttctaggttttcactgtagtgaacatctttaaatatatgtcttgaagtactttttttttttttttgagatggagtctcactctgttgcccaggctggagtgcagtggtgcgatctcggctcactgcaacctctgcctcccgggttcaagtgattatcctgcctcagcctcctgagtagctaggactacaggtgcataccaccacactcagctaatttttgtatttttagaagagacggggtttcaccatattggccaagatggtcttgatctcctgacctagtgattgaagtacttttacagctatataaatagaataaatttctaatgttaggttgaaataaatgtgaattttgaaaaatattagggccaggtgtgatagcttatgcttgtaattccaagactttgggatgccaagacagctggatcacttgaggcctggagtttgagaccagcctggccaacatggcaaaaccccatctctactaaaaatacaaaaattagctgggcatggtggtgcacacctgtaggcccagctactcatgaggctgagatggaaggatcacttgagcccaggaggcagaggttgcagtgagccgagattgcaccactatactcctatctgggtgacagagtgagaccctatctcaaaaaaaaaaaaaaaaagaaagaaagaaaagaaaatattaggtggataaatgatgtggtggcaccacttattatcccaaagctttgggaggcagaagctggaggatcacttgaggccaggagtttgagaccaacctaggcaacatagtgggatcccattcctaaaaaaaagtcatttgggctgggcatagtggctcacgcctgtaatcccagcactttgggaggccaaggtggacagatcacctaaggtcaggagttcaagaccagcctggccaacatggtgaaaccccgtctctactaaaaataaaaaattagccaggtgtggtggcatgtgcctcccgagtaccagctactcgggaggttgaggcaggagaatcgcttgaacctgggaggcggaggttgcagtgagctgagatcgcactactgcactccagcctgggtgacagagtaagacttcgtctcaaaaaaaaaaaaaaaaaagtcatttggacatggtggcttgcaccataatcccagctactcaggaggctgaggagggaggattgtttgagcccaggaattcgaggttgcagtgagctatgcttgcatcactttactccagcctgggcaacagagaaagaccccctcttttttttttttttttttttttgagacagaatctcgctcttgtcgcccaggctggagtgcagtggcgtgatcttggctcactgcaacctccacctcctgggttcaagcaattctcttgcctcagcctcccaagtagctgggattacaggtgtgcaccaccatgcctggctaatttttgtattttttagtagagacagggtttcgtcatgttggccaggctgatctcgaactcctgacctcaagtgatctgcctgcctcggcctcccaaagtgctggcattacaggtgtgagccactgtgcctggccgagaccccatcttttaaaaaaagaaaaaaaggaaggaaggaagggagggagggagggaggaacaaagggaaggagggagggaagaatggaaggaaaggtggaaggaaaaattaggtataccaaatttttctttaaaattatttatttgtctgagtgctgtggctctacagaaaattaaaaatttagctgggtgtggtggcacatgcctgtagctccagctgctcaagaggctgaggtgagaggattgcttgagcccaggagttcaaggttacagtcagctatgatcacaccactgcactctaacctgggcaacagagtttagtccaatagcatgagtttctttttctttttcttttttactttaagtttcgggatacaagtgcagaacatgtaggtttgttacataggcatacatgtgctgtggtggtttgctgcacctatcaacccctcatctaggttttaagccccacatgcattagctatttttcctaatgctttccttccccttgccccccaccccccaactggccccggtgtgtgctattcccctccctgtgtccatgtgttctccttgttcaactcccacttatgagtgagaacatgcagtatttggttttctgttcctgtgttagtttgctgaggatgatggtgtccagcttcatccatgtccctgcaaagaacatgatctcattcctttttatggttgcatagtattccatggtgtatatgtaccacattttctttatttagtctatcattttggggcatttgggttggttccatgtctttgctattgtaaatagtgccacaataaacatatgtgtgcatgtgtctttataatagaattatttatattcctttgggtatatacccaataatggaattgctgggtcaaatggtatttctggttctagatccttgaggaatcgctacactgtcctccacaatgggtgaactaatttacactcccaccaacagtgtaaaagcattcctatttctccacagccttgccagcatctattgtttcttgactttttaataattgccattctgactggtgtgagatggtatctcattgtggtttttttttgcgtttctctaatcattagtgatattgagcccttttttcataccttttttggccgcataaatgtcttcctttgagaagtgtttgttcatatcctttgcccaatttttgaaggggctgtttttttatttcttttttgtttgtttgtttttgagagggagtctcgctctgtcacccaggctggagtgcagtgctgtgatctcggctcactgcaaggtccgcctcctgggttcatgccattctcctgcctcagcctcccgagtagctgggactacaggcgcctaccaccatgcccagctaattttttgtatttttagtagagacagggtttcactgtgttagccaggatggtctcgatctcctgacctcatgatccgcctgcctcagcctcccaaagtactgggattacaggcgtggggctgtttttttcttgtaaatttgtttaagttctttgttgattctggatattggacctttgtcagatgggtacattgcaaaaattttctcccgttctgtaggtatagcatgggtttcagagttttgagggagaaaggagggacactgatctgtaggtggcaataaggagcaagtccctaaaaaaatacatatatataaatgatttcattaacttacattctcatcaacagtgtatggatgtcctagtttctctatactgttcctcctcccctcctccaactgggaattgtgtgttaatgttaagtggtttgtgttaagctaaattgcaaagtattggctgggtgcgatggctcatgcctgtaatcccagcactttgggaggctgagatgggcggatcacttgaggtcaagtgtttgagaccagcctggccaacgtggtgaaaccctgtctctactaaaaatacaaaaattagctgggcgtggtggcacgtgcctgtagtcccagctactcgggaggctgaggcaggagaatccaggaggtggagtctgcagtaagccgaggttgcaccattgcactctagcctgggtgacagagtgagactcttgtctaaattaaaaaaaaaaaaaaaggcaaagtattctaattggttgattggttgtctctgatgaatagcactgaaagaggaaggaagggtactattgcttttcattataactccctttatattttttaatttttaattatgtgctggttatatgaatcatttaaaatatgtgtgtgcgtgtgtgtgtatgtgttatagtgtgtatatgtaaagaagcatagtcaaatatgatacccttagcatccatagccaattaattgtgctgtgctgccagattattttccatgtgtgtgttcatttcctaataaactttgccatttctatttaattgaagagtagcttgaaattttaagagaagctgatttttttttaaattactatttgtatggcatttttggaaactggattgtcttcagtgtaatataacaaaaccaattagctattggggctaatataaaactgcagcagtatctacaacttcagatttaagatgtttgcattaattaaagcaacctaatttttctaactgaatggactataatatgtaaatgttatataactcaaatatataaaataaatgtgcacctaaaaacaagttcttatagcatgaaaattaaactcttgattttaaaaatattgactaacattgaattcagactttgtgttattttaactcacaatttatttttttaaatctgatagaaatttgtcagaacatatggacttgtaatatctttgctttaaaatatattcatttttatactttagagatatattacttactgacttttaaacttttttttttttttttttttttgaggcagaatctcgctctgtcgcccaggctggagtgcagtggctcggtctcggctcactgcaagctccacctcctgggttcacgccattctcctgcctcagcctcccgagtagctggggctgcaggtgtctgccaccatgcccggctaattttttttgtattttttttagtagagaggggatttcaccgtgtcagtcaggatggtctccatctcctgcctcatgatctgcccgccttggcctcccaaagtgctgggattacaggcatgagccaccgcacccggccgacttttaaactttttaactagcgatataatattttcagtcttttggccttctgcagctacctttccaaaaaaattgtggaatcttagttaagtgtttcggttgcagtttcctttactgttaccagttacccaaaatagatatatcaatcaggggcctttgttactgtagcagtgttacctcaaataaattcatttaaggccaggggtgttggctcactcctgtaatcccagtattttgggaagctgaggcaggtggattgcttgagcccagttcaagaccagcttgggcaacaaagtgagaacctgtctccacaaaacattttaaaaattaaaaaattagccaggcggccgggcccggtggctcatgcctgtaatcccagcactttgggaggctgaggcaggcggatcatctgaggtcaggagttcgagaccagcctggccaagatggtgaaaccctctctctgttaaaacatacaaaaatgagctgggcgtgatggtgggtgcctgtagtcccagctactcaggaggttgaggcaggaaaatcacttgaacctgggaggcagaggttgcagcgagccaggatcacaccactgcactccagcctgggcaacagagcaagactccatctcaattaaaaaaaaaaaaattaaccaggcatggtggtgcttaccatggtctgtgatctcagctacacgagaggctgaggcaggaggatcacttgagcctacaaggttgagactgcagtgagctgtgtttgcaccactgcactctaggatgggtgacagagcaagaccctgtttccaaaagaaaaaaagaagattcgctttatctggcagatacaaccagaaacaaaaaagcctctcactatggaaaaatgtactaatctagcattcttatactattgtcaggactacttgatatttgaaagaaattattatatctattatatattatattactattatgttatctgaactcttagagaaggtatttggttactaactaaaatcacaacaagatactattatacacccatcagaattgctaaaattaaaaagactgacaccaccaaatactggtgaagatgtggaacaaccaaaactctatacattgtcaatgggcttgtaaaaaggatataaccactttggaaaaagggctggctgttttgtgtaaaactaaacatgtaccttccctgtgacccagcaatttcatttcttggtatttgcccaagaaaaatgaaaacatatatctacgaaattactcacacacgaatttttttttttttttttgagacagagttttgctcttgttgcccgggctggagtacagtgacgcgatctcagctcactgcaaccttcgcctcccgggttcaagtgattctcctgcctcagcctcctgagtagctgggattaaaggcgcccaccaccacgcccggctaatattttgtatttttagtagagacgaggtttcatcatgttggccaggctggtctcgaactcctgacctcaggtgatccacccgcctcggcctcccaaagtgcagggattacaggcgtgagccactgcgcccggccgaacacatgaattttaatatagctttattcatcatggccccaaagtggatacagcccacgtattcatcaatagaagaataaataaactgcagtatgttaataaactggaaaactaatcaacaataaaaagtaattattattgatatacaataatatgatgaatctcaaaaatattttgctgagtaaaagaagccttacataaaagaaaacaggctatatgaatccattcatacgaagttcaagaagagacacattaatctatgatgaaaaaatgagaacagtaggagattgagagtgaggattgactggaaaggaggaggatggaactttctggagtaattatgatgtcctatatcttggtagggttttgagttacataggtaaatgcatttgccaaaattcaatgcatgtatatagaatatgtgttttattatatgtaaattttactaaagcctgtacaaaattttgaattctagttaacaatatgcatatttgcagggggaaatgtactgatatctgtagggtgctttaatatgcatgagaaataagatgcactgatggattgatcaatagatagcaaaatattaatggtagaatctaagtagtgggtatatgaatgtttactgtaaaatcattttcatttttctgtacatttgaacatttgtataatagaatactgagaagtagaaaaaaagcattcgatactctcagaaacaatttttttccttatgtattccatgaagagaagcagagtcagcaataacccctgaaagttaagttgcttgcttattatgtttctggctggatataagttttcacagaaccaatagagatacaactgggtttctttatgttatcatgttattttgttttacatacatatttgggaagttagcttgtttattctcaactcatcatttaaaattctgttagctttggaaggtcgtaaaaatgagatacactgtcattattttcaatatcagaaattcttcctgctatctctgttttgaaaatttacttgttttgtttacggtcatactaccctgaacgtgcctgatctcgcctgaaaatttacttgttctatcacaatttataagaatcaagtatctgggctgggcgcggtggctcatatctgtaatcctagcactttgggaggctgaggcaagtggatcacttaagtccaggagttcaagaccagcctgggcaacatgggaaaaccccacctctacaataaattaaatgtatatatacacacacacacacacacacacacacacacacacacagacacacacacacatatacatacaaaaaattagctggatgtggttgcacacgcctgtagtcctagctactctggaggctgaggcaggaggatcacttgagcccaggaggtcaagtctgtagtgatctgtaattgtaccactgctctccatattgggagacagagtgagaccctgtctcaaaaaaagaaaagaaaaactgaataataaaaaacagatctgatgaaagttgtaataaaatacattgccgtgaataacataaaaacttaatcttataaacactttgattaaactagaacacaaagtagagataggtcaaggaagatttggtgcagaagataaagccttaggtaacagagcttaggaaataagtaaacgaaaaaaattgtcagtgaaataatggacatattggaagtgcaaaaggagaatacacacttctggaaaacatagtaagggacatgggaagctagagaaaaaaatgagcaaaatgaaatggaaattaaccaagtgtttaaaaggaatagagagccaatgtaagatgtagaacatggataaagtagaataattgtctctgaagaataaagctcaatagaaaataatatttaaagattttttaaaggaaactattcagaaacaaatgcagacttgaggccaggtgtggtggcttaagcctgtaatcccagcactttgggaggctgaggtgggtggatcacctgaggtcaggagttcaggaccagcctggccaacatagtgaaaccccatctctactaaaaatacaaaaattaaaaaaaaaaaaaaaaaaaaagaaagaaagaaagaaaaaagccgggcgcggtggctcacatctgtaatcccagcactttaggaggccaagacgggcggatcacctgaggtcgggagttcgagaccagcctgaccaacatggagaaaccccatctctactaaaaatacaaaattaaccaggcatggtggtgcatgcctgtaatcccagctacttgggaggatgaggcaggagaatcgcttgaacccgggaggcggaggttgcggtgagctgagatcatgccattgcactccaacctgagcgacaagagtgaaactacatcacaaaaaaaggaaggaaggaagggagggagggagggagagaaggagggaggaagggaggaaggaaaggaggaaggaagaaaggaagtcaggtagacttgaatctatagattgagagagtacatcatgagccagggaaaatgtacatagaacaattataataaggcaaaacctagtcatgttattggactccaaaaattaaagaatgattccagaaaaaaagaaaaaaacatatgagagggagaaagatttggacttacttcagaattctcctcagtatgtttcagtgccagaagactgtaggctttatagactttatctatagtcctcaagaaaataatgtgtgatccaaggttttatatctagcttacctgttatttaggtaaaaaggcaacagatgtttttgaacattcaagaactcagaaaatataatttccctgatgcctgtactgtgcccagccagccaaacaagtgataaagaaaatgtcacaaaagaccttatgtgagcatgcaatccataagattcatgtggggcttactattccagaagagaatttacatgttataaactctgacagtgtaggtattaaatgaccccaaagaattgggagggctgggtgtggtagctcatgcctgtaatttcagcattttgggaggccacagcaggaagattacttgaggccagtagtttgagaccagcctgggcaacaaagcaagaccctgtcttttttcagaaataaataaaaataaaggattggaaggataagggtgagagatagtaggaagtgctaaaactagcaggagggccgtgcgcggtggctcacgcctgtaatcccagcactttgagaggccgaggtggatgaatcacttgaggtcaggagttcgagaccagcctggccaacatagtgaaacctcgtctctactaaaaatacaaaaattagccggggatggtggtgcacacctgtaatcccagctactcaggaggctgaggcaggagaatcacttgaactcgggaggtggaggttgcagtgagccaagatcacatcactgcactccagcctaggcaacagagcaagacgctgtctcaaaaacaaacaaaccactagcaggaggatgtactccagtaaaatctaagaactaatttattaacataaattataaaaacaaacaaacaaacaaacatgggatctgggaacaggtgatccagcacagaagggctccgtaaggaagttccaggatatcatttttataccaggcctaggccagggagttttctagaaaaaaataaggactggtttatatgagcatatgaaaaatattattattgaatggcatgccacgatgttggagcttttggaaaaagaatactgataggtatgttggaaacaaagcaaatgaaaaaaataaagcagttaacaactccaggaaaaacaaaatacagtcaggcaccccacaacaacattttagtcaataacaggccacatatacaatggtagtcccataaaattgtaatagagctgccctgctctatatagatgtaccgtttttatgttataccatatttttactgtactttttctatgtttagttacacaaatacttacactgtgttaaaactgcctacagtgctcagtacagtaacacactgtgcactattgtctctaggaacaataggctgtaccctatagcctacgtgtgtagtagactataccatctgggtttatatgagtatgctctatgatgtttgcacaatgacaacatcgcctaatgatgctcttctcagaacgtatccccattaagtgacacatgactgtaattgtgcaagaaaaggagttcttgtataattagtctgctgttcagcagttcacactatttgtatggctataataatattttaaaactcactgatttaaccaaatattgggagaattgagggagaggagagttgtgtatgtgagaacaattactaaaacttcatgttggtgaaatgatactgttaatattgataaagcaagaaatcggaaacaactaagatgccttctaccatggggggaagataataaatctgatatttaatattgataaattaagaaatatcaatataaacattttatttagaaagatggaaacaggctgggtgtagtggatcacacctgtaatcccagcattttgggaggccaaggtgggtggatcacctgagatcaggagttggagaccagcctggccaacatggtgaaactccatctctactaacaatacaaaaattagctgggcatggtggcgggcgccagtaatcctagctactcaggaggctgaggcaggagaatcgcttgaacctggaaagtggaggtttcagtgagccgagatcgcaccattgcactccagcctggaagacgagtgaaaccctatctcaaaagaaaaaaaaaaaaaaggctgggcgcagtggctcacgcctgtaatcccaatgctttgggaggccaaggcgggtggatcatgaggtcaggagttcaagaccagcctggccaagatgctgaaactccatctctagtaaatatacaaaaattagctggatgtggcggcacgcgcctgtaatcccagctacttcggaggctgacgcaggagaatcaagtgcaaccagaggttgcagtgagccaagatcaagccactgcactccagcctgggcaacagagcaagacttcgtatcaaaaaaaaaaaaaaaaaaaaagagagatggaaacagggagaatgactagaagagttgaagttgatagcctctgcagcttagagaagaatggggaagcgtctttcattataagtcttgtaatagtacaatttgactttttaaaggaggtgactacaatattttgacaaaaataaaaataatttaaccaataagggattatttctctgtgtgtagtgtgcacaaaaagttatgtaaagctatttactgaagcattatttatttggtattaattacaaattatatcctgtaggtaacaactcaagattatgttacatggtacactgttttgtaaatatatttattttctactcttaaggaacattcattctaaggagttagggaatggcttaaacatatataaatcagaaaaatagtagtttacccattcagcaaatatgtattgagcactgtgtgccaggcactgatctgggcactagacatcaaaaagagacaaaagcatctgcagtctagtggaggagcaatggagacataaacagtaaacataataaaaatggtgtggccgggcacaatggctcagcctataatcccagcacttttggtggccaaggcgggtggatcgcttgaggtcaggagtttgagaccagcctggccaacatggtgaaaccccatgtctactaaaaatacaaaaattagctgggcatggtggtgggcacctgtaatcccagctactcaggaggctgaggcaggagaatcgcttgaacccaggagacagaggttgcagtgagccgagatcatgccattgcactccagcctgggcgacagagcgagactccgtctcaaaaaaaaaaaagaaaataaaataattttaaaaatggctagactgggccgggcgcggtggctcacgcctgtaatcccagcactttgggaggctgagacgggcagatcacaaggtcaggagttcaagaccagcctggccaacacagtgaaaccccgtctctactaaaaatgcaaaaattagctgggcgcagtggcgggtgcctgtaatcccagctactcaggaggctgaggcaggagaatcgcttgaacccgagagacggaggttgcagtgagctgagataatgccacgcactccagcctgggcgacagaactagactccatttcaaaaaaaaaaaaatggctaggctgtattagaagttgataatgtctatgcaaaaagaaaaagacatacggcataagaggattcggaagtgcaaggagaagaggaggaactatcaaaggagactgagaagacagaaccctgggagtatataggagaatgtgacgttacagaagcttagagaataaagatcatgtcaaggtagacgacatgatcagtagccaaatgctcctgaatgaagtggacctgagaatagactattggatttagcaaaaggaaggtcacttatgtgatgttgacaagagctgtttcagtaaagatgtgctatctaatttcttctcgtcatggagaaaggatgacaagaaagatagttaccactaagccctcttatttttgtgatcttatagcagtagtcatagtttgatctttggtaaatttgtaacatctagattgctattcacagaagacttaggataactttggttttgcttggatgtgaacctgatcagtgtgagcaaatggttggtaagattatactgttagcagcagtagggaatgagatttcttttttttttaaattttattattattatactttaagttttagggtacatgtgcacaatgtgcaggttagttacatatgtatacatgtgccatgctggtgtgctgcacccattaactcgtcatttagcattaggtatatctcctaatgctatctctcccccctcccgccaccccacaacagtcctcagagtgtgatgttccctgggaatgagatttctgttgtgaaccccaaacccagaactgcaggaactagtcctttggtagattacattatttagttgtagaaaaactaatgaagagaatcggtggtgtgtgggcattgcaatcagttgactccacgtggcattcctagaggttgctatagaaagaaagaaaatagcttaaattcagccccaattttaattccatatagtccactaagaaaaagaatactaagtcaggtggagaacttgccttcattatttttagcttaatgtgttattctagatttagaatacctatgattaactgggatgaggggatgatcagaaattcaatatttaactgctgtcatcctagcaagggcatactgagtagatagcatcatcataatatgtgggctgagatgaggctgctccagacgagtctctctcaaagttaattgatggaaacttcccaccttcaagaatttttattaccttagcaatgctatgccaagactgttgaaacacagctgtgggtgctgtgcagacgcccacattgccaatgtcaggaaggatgtacttttaaacctctaatttatctaataatgtcgttagtgatttgtgtaggtttggcattgtgatgaaaatgcttcctggcttggtttataacaagaattcagtttgcagtcttaaaatgtatattgtcttaatatgcatgtggaatatactaacaagtcaatacaaaaagatctgaataaaatactatcctgtccatctaaaggaacttattatcaacccatggtatttgaaaatgaatgcaaattaaatgtttttattcagtaataatctatttatctgttgtggttcctgctttataacaagatggcaatattcagtgctgaaagagagccagctttcatattcaatccaatctgactcctttcctattctctaatggaaaatacgaattgattggattgatgtcagcctatatagtggagatggaataataagctcttgtaaggccgggcgcggtggctcacgcctgtaatcccagcactttgggaggccgaggtgggcggatcatgaggtcaggagatcgagaccacggtgaaacctcgtctctaataaaaatacaaaaaaaaaaaataaaataagctcttgtaaataaatattttaaaagaggtaggaaacagtactttcttgtttcaaatataaaattttatagtaacaatattgttttatatgacatttatcatgtaggcctgtctcttttttttttttttttttgagatggagtctcactctgttgcccaggctggagtgcagtggtgccatctcggctcactgcaacctccacctccccagttcaagcgattctcctgcctcagcctccccagtagctgggattacaggtgcccgccaccacgcccatctaatttttgtatttttagtagagacggggtttcaccaccttggccagnnnnnnnnnnnnnnnnnnnntgctttataacaagatggcaatattcagtgctgaaagagagccagctttcatattcaatccaatctgactcctttcctattctctaatggaaaatacgaattgattggattgatgtcagcctatatagtggagatggaataataagctcttgtaaggccgggcgcggctgacgcctgtaatcccagcactttgggaggccgaagtgggtggatcacaaggttaggagctcgagaccatcctggccaaggtggtgaaaccccgtctctactaatagtaaactacaaaaattagctgggcatggtggcaggcacctctaatcccagctactcaggaggctgaggcaggagaattgcttgaacccgggaggtggaggttacagtgagccaaaatggtgccactgcgctccagcctgggcaacagagtgagactccatctcaaaaaaaaaaaaaaaaaaagaaagaaagaaagaaaagaaagaaagaaaacaaataatacaaaatgtgaaggattctttcctaactaatggattcactgcaaggattgattgcatttatcaaaataaatatacatttaatgtttcagaatacacccacagcataaagcagaatattcctaattatttatagaaggaatatatagcatttgtttctaccccactggactatgtgaaaacctttggatctgaagtgtgtttacacttttaagctgcctttgtcccatctttgaaattaaaaaaccttatttggaatagaattatagaagtagaattttaggcctagaattgactttagagttattttattctaacttaattttctagttgaggaaattgaaatccagggactttaagcaccttttctaaggttacccagctataactagaacccacctttctaactccttatatttctgctctaatttcttgtctccaacaagttagtcaaatagtaattaaatggtaagttggcagaagttttaggtctctcgtgtgtgtgtaactatgtattttcaggctccaaagtcaatagtggtctgtaattattcttcatatatatatgtttttatctttgtcattacatggagaaatcagtgtttaaattataagttaaagtgatttctgagtatctgaggtatctatgaatacataaataatagtctttaatatctacatataggtaacaaggacccatatataattaagtcctgcaagcactataggtgaaggaaatgctaaggattctcctatgactgggccccattatgaaatttaaagaaatcagtacttatctagagcataagaaatgaacatgctcagtactcataggctgtctatgctgatacactaattctttttttttttttttttttttgaggagtttcgctcttgttgcctaggctggagtgcaatggcgcgatcttgactcactgcaacctccacctcctggattcaagcgattcttctgcctcagccgccagagtagctgggattacaagtgcccaccaccacgcccagctaattttttgtatttagtaaagagggggtttcaccatgttggtcaggctggtctcgaactccggacctcaggtaatccacccacctcagcctcccaaagtgctgggattacaggtgtgcaccaccacgcctggcccactaattccgataatgacttggatagttcccataatgatttaacatctgtctcctgcttcaaccctgtccccagatactaaaacaaactaaaataatttgtgtaagtaaagtactgacctattgaaggttattagaatgcagttacatttttataattcaaaatcttccaccaagcatgttttcagctgtggctatttttgaaatagaattgaggaagcaagataaatatttggaggataaagatgatgctagccaatatgagctgcaggaaagaacagtcagaacattcatgactataagttttgtgggggttttatgtgtgtttgtagaacacttactgttagcttaaagcaagcaagaccccatgctttgtttacaaagctcaatttatgaagtttaagtagagcctggatttttgttttacaattcataacatcaagaaagtcagtatacacagaaattcatatatgtattcatgaacataaatagccttaatgaagtggaacgtgttacttatgtgactaaacttaaaaattaaaactaaatgggcccctaattaatgattttcaacattgtttaaaaaatatttatgtatataatttttatatgccttagacataaaataggcaaagattttatttccgtctatgaatatataaaattagtactttgatacctaaaacaaacaagaaaacatcaaattggtatgtatggaaaaactttccttttgttctcaggatgtgaattgcttgaagataaaaatggaaagcacttcaaaatatctgtttatatacataaaaagaaaagcattattcttggactatatttgagagtcctaacaagattaatttgacttggacacagagtcccccaaaatgatactgcaaatattaaaggatttctaatcatattgcagttcagcagtgttctcaacacaatgacatttataaacctagtactccaaactgccatgagtattggctctcttttgatatttgctatgcttattacatttgccgaactttaaaactttctgtatcaggatctttcaagtattttaagagaaatgatgaaagaaagcagcttgctatgttattatcatgttagtcactcctagtgattctcttcaaatgacaagcattagtgataagcttttatttgaggtgtatcaaatattctctgatgtgactgctctaaaatatatttgcaattctgatttttcagaaataatcacttccaactcaaagtcaaaaccataagaagttattcatgctaagtgttacagctttctgacatgtaggaataactgatgtgggtgaagcatctagcttaatgttttatatctagctattagtcagctaatcctcctccctacttcactgaaaatattttcattctgtctgacaaaaggtaaaaaaattatattaactgtgactaaaaatgtattgcagatgacacattaatgagactaatggttcttgccttattctctaaagttttcatttcttacatttgttgaacctacatccagatagtttaataattacacagaagatatccttttcttttggaactctaatggaacaagattacaataaaggttttcagatcatttttgttttttgggtttttttttgagacagcctcactccattaccccacccaggctggagtgcagtggtgtgatcgggactcactgcaacctgcacctcccaggttcaagcaattctcatgcttcagcctcccacgtagctggggttacaggtgtatgccaccatgcgtggctaatttttgtatttttagtagagacagggttttgccacattggccaggctggtctcaaactcctgacctcaggtgatccacccaccttagcctcccaaagtgttgggattacaggcgtgtgccaccacacccggcccagatcatttttaatgtaaatttaaaaaacaacccagtaaattccataactatatactaaaaattcatataggtaaaacatttggaatgtgtccagttaatcagagtaagacatgacagaaaggtaaagataagcgatttttacagagattaggtctgtgaagaaacattttgactcatcaaaattcagttaatttccatagcatggaaggagacatggtaacattgtttataaagcatttggattttaaagggatcccatcaatttatttaataattgttaaagggtagtagcttttaaatttttttcatcataattcagtatatacttacctacatatatatgtgaaacaatgctttacctcatgcaccttattctatttcctttaaaaaatgctggtcatgctgggtgcagtggctcacgcctgtaatcccagcactttgggaggctgaggttggcgggtcatgaggtcaagagatcgagaccatcctggccaacatggtgaaaccccatctctactaaaaatacaaaaattagctgggtgtgttggtgtgcacctgtagtcccagctactcgggaggctgaggcaggagaattgcttgaacctgggaggcagaggttgcagtgagccgagatcatgtcactgcactccagcctggtgacagagcaagactccatctcaaaaaaaaaaaaaaaaaaaatgctggtcataggccgggcatggtggctcacacctgtaatcccagcactttgggaggccgaggcgggcagatcacctgaggtcaggagttcgagtccagcctggccaacatagtgaaaccccatctctactaaaaatacaaaaattagctgggcgtggtggcaggcacctgtaatcccagctactcgggggagtgaggcaggagaatcgcttgaacctgggaggtggaggttgcagtgagccaagatcgcgccattgcactccagcctgggggacaagaccgagacttcgtctcaaaaaaaaaaaaaaaaaatgctggtcataattcatacattaatttcattacccactaatggatcataaactgcaatttgaaaaatactgatgaataatagctgggtgcagtggctcacacctgtaatcccagtactttgggaggctgaggcgggaagatcgcttgagagtaggagttcgagactagcctgggcaacatagtgagactatgtctctaaaaaacaaaaaacggggcatgggtcatggtggcttgcacctgtagtcgtagctccacaggaggctgaggtgggaggattgcttgagcccaggagtttgaggctgcagtgaggtatgactgcatcactacactccagtctgggcaacacagcaaggctctgtctcaaaaaagaaaaagaaatattgatgaataataaaataattttctaattttttttccttgaagacatagaatgtaagcattgccattttatatgttcctgaaccactcacttatttggactcatctagaccttgttatcaaaaattgcatcagctcacaaatcttgtacacaagcatcctgctctcagacgacaacattctgccctagattttgtgcccaagtactcccacctacaattctttaattacatttagaccacactgatttacaactcaagtctgttctttaagatttgtgggggtagggggagggatagcattgggagatatacctaatgctagatgacaagttagtgggtgcagcgcatcagcatggcacatgtatacatatgtaactaacctgcacattgtgcacatgtaccctaaaacttaaagtataataataaaaaaaaagaaaaaaaaagatttgagtatcttaaaaagatactcaattctgcctgatgcagtggctctctgtaatcccagttactcaggaggttgaggtgggaggatcccttgagcccaggagttcaaggctgcagtgagctatgattgtgccactgcactccagcctggaaaacagagtaacactctgtctctaaaaacaagtaaaaattttttttaaagatagcaatctctagccaaagatgattgaataaaataaaaagtgaattaaaaaaaaaagataacaaatctgcagggggcggaaattgcagtgagccaagatcgtgccactgtgctccagcctgggtgatagagtgagaccctatctcaaaaaataaaaattccaaatctccatttctcttcttcgctttatagtactaccttgcaaaaccccaaatccttcttgtcagagacatttctctaaaacttaaataaaaaacaaaacaacaaaaaaaacacacaaataaaacaaaaaccaaaaatgaacctcgaataaaccgccaatcttgtgacacttgatgaactaaatggttctttctacctacgcatgtgccaacatagatgaaaaagtcatgccatcagaaaaactggtttcatttaaaaattatctcaaacttcccacagtctcttagcactgtgtgacagtcctactactctctgatatgacgatttcatatctgctctgacttcatccctcctccttcctttctaccctcatgacctagtttgtgatttaacctagtggctctcaaaatgtggttcccagacccgcagcatgagttcatatttaacttgttaaatatgaagattcacaggcctcacatcaggcttattgagtcagaaactctgtggatggggcccagcaatctgtgtgctaagaagccctgcaggtgattctgatgcgtgagaaagttttgaaaatgaatcttgcctcatacttcattgagaagcccttctttagaatgtaagctctaagagggcaggggttttttcttttttgtttatatataccctgagcactagaacagtgcctggtacatagtaggcctcaataaatatttgttgtctcaaatcattaaatgggaatacccgtcgtttcctactaacatctaaaaacatacctgcatctgtactgattttcttctttttccaactaaggaaatgtgcctcatcctacagtcagattctacaccattctaaaacaacaacagactttccctttcccctatcccctatcagttactgccccatatctctgtttcccctctgtgccaaacctccctgccccctactcagtaattaacccattctagcctgattttcacttccactattcagtagttcttgacaaagtcagtagtttttttattatctttattgagatataattcgcataatataaaatttacccatttaaagtttacaactaactgatcacaaccagtcataggtttctttgttccttctctactcccactgcttcacatgacttgcctttttaaaaaagtgtacaattcaaggattttaatacagtcacagttgttcaaccgtcaccctaagttccagaaaattttcatcaccccagaaagaaaccccctacctattagcagtcactcctcattcccaccacccctccagccctaagctaccactactctctgcttctataaatttcctattctgggcttttcatataattattattatagaattataaattctacaataagtggtctttgtgactggcttctgttgctatccataatgttttcaaggttcatccacactgtagcatgtataagtgcttcattcttttttatggctaatattccagtgtatgaatatattgcattttatttatccatcaagtgatggacacttggttgtttttactatttggcgattataaacaatgctgctgtgcacattaatgtatgagttttttgtgaatatatgtttttatttctcatgcatgtatacctaggagtggaattgctgggctggccatatggtaactttatgtttaaaatgttaaggaagtgccaaagcagctgtaccactttacatctccactaggaatgtatgagagttccatttatccatatagttgccaacacctgttattactaattgtcttttttgttatagctattttattatagctatcctagtggatgtgaaatggtttctcattgtggttttgattagcatttccctaatgactaatgatgttaaaaggggaagaaaaaaacctgtttttctgtacagtcacacacttctttttttttttttttcgagactgagtctcactctgtcatacagactggagtgcagtggcatgatctctgcttactgcaacctccacctcctgggttcaagcgattctcctgcctcagcctcccgagtagctgggattacaggcatgccaccacactcagctaacttatgtatttttagtagagacggggtttcgtcatgttggccaggctggtctcgaactcctgacctcaggtgatcgtcccgccttggcctcccaaagtgttgggattacaggcgtgagccaccttgcccagcctcacacacttctgacactaaaagtgtgtggggttttcccaccaaccaattctccatttctccctggacatcaattaggtgtcttacaatttaactcaattctgacactaattgcctggagttacaacagatcccacaggataacgggctcagtcctgcaagatgccccacctcagatgccagttaaaagtctggacctcccaaacttctgaccaactggttataaatcaaggtttcctacaaccttctcccaagttaaataatttgctataatgtcttacaaaattcagggaaacattcacttatgtttactggtttgtgaaaggatattataaaggatataaatgaacagccagataaagagagatatacagggtgaggtcctgaaggggaagggtctcaaacataataggttctgttggaggtggggtatgccacccttctagcacatagttatgttcatcaaaccagaagctcccaaaatcccatcttttaaggatttgcatggaggcttcatcacgtaagcatgttcaaataattattaagtcaatctcccatctctctcccttccctagaaaatgggaatagggttgaatattccaggcctcttattatgggttgatctttctgatgcccagttgccatcctgaagctatccagtagcccaccaagaactgcttcataagaccaaaaggcactcatagactatacaggaaattccaagggatttagaagctctatgtcagaaaccaggttcaaagactaaatattagaagatgcttccagtaccccgtcactcaggaaataaaaagggttttaggggctctgtgtcaggaaccaaggcggaggacaaatatttatttccaattatgtcacagatgttgcacatcttttcatgtgcttattgcccatttgtatatcttctttggaaaaaagcctttgggttgtctttttattattgaaatataaggattcgttacatatttgggataccagtctcattagatatatgatttgcaattttttgttttgttttgagacagggtctctctgtctctcgggctggaatataacgatgattatggctcactgcagccttggactctgggcttaaagcgatcttcctgcctcagcctcccaattagctgggactacaggtgtgcccaccatacccagctattttgttgttgtttgttttgagacagggtcttgttaagttgcccaggctgatctcaaactcctggccccaaccttacccccttgcaaagtaccaaaattacagacataagccactatgcctggcagatttgcaaatattttctaccagtctatgggttgtcttttcactttactgatttgtgatacaaaagttttaaattttgatgtagtccaatttaatattttttttcttttctgcttgtgcttttggtgtcagagctaagaaaaccattgcctaatccaaggtcatgaagatttactcttttaggagttttcttttaggagttttatgagttttagctttacatttaggtctgtgatgcatttggcattaatttttgtatatggtgtaaggaaggggtccaacttgattattttgcatgtggatatccaatttttccagcaccatttgaccattttgttaaacagaaagttattttcctttttcctgttttttttttttttttttttttttttagacagtcttgctctgttgcccaggcttgagtgtgatctgcccacctcggtctcccaaagtgttgggattacaagtgtgagccacactcctggccttttttttttttttttttttttgagacagtcttgctttatcacccaggctggagtgcagtgacgtgatctcagctcactgcaacctctgcctcttgggttcaggcgattctcatgcctcagccacccaagtagctgggattataggcgtgcaccaccacacccagctagtttttgtatttttggtagagacagggtttcaccatgttagccaggctggtcttgaattcctggtctcaggtgatccacccaccttggcctcccaaggggctgggattacgggtacgagacactgcacctggccttttttttttttttttcacttatttgacctctcagcaattgacagagttcactgctccctccttcaaatactctctactatctcggttctccttttacagattttgccatttctctttagtcttcataggtcccttgtcttctactaagcttctaaatattgggttttcagttattgtcactgtattgcaaattaccacaaaacttagtggcataaaacaattatttattatgctcacaatgtctttcagtcagaaattaaaactgggtaaagcaaggtcaccttatctctgttccaactggggtctctgttggaagactcaggctgggggactggaatcatctgaaggcttgtgaacttacatgtcaagcaattgataatggctactgcctgggagacctcaggctacatccacatgagcctgttcatgtggtttctccacatggctagtttgggcttcctcatggcttgatggcttggctgagtatgaagagcaagtatccagagggagacagaggaagaaagaagaggaagccgggggaagccacgtggccttttatgaacaaacttcaaaagtcacacagtatcacttttgctacatttttttcatccgagtagtcaccacacctcacccatgtttagattaggaagggaaacagactctatttttttatggggaatggcaaagttctaaaatagcatgcgggaccaggaatgctgttgcggcctttttaaaaataatctgccacagtcttttctggccacacaattcacatccttcccatgtgctaaatgcactcacccaacatcccctaagatttcccaaagtctaatcccattatggtattaggctgaagcttgaggtccaagatttcattgaggccaagaccatggcagataagatttcttatctggcaagtaaggtttcttcctttaaaaaaaaattctccaatgagagtttaatttttatgtttatcaaagtgtatactatattagatcatttgtgtaccagtagttacactgataaggcaatgaaaaagaaaatgtttaacgctggagccttatggtcacagaaagtttttaaaaatttaatttcaattttcatacatatttttactgcagagacatattatatactgctttggctgagtcccataggttttggtatgttgtgtttctgttttcatttgtttcaaggaattagtcaatttccttcttaatttctttcttcacccattggttgtttaggagcatgttgtgtaatttccatgtatttgtgtaattttgaatgtttcacttgttattggtttctagttttattccatagtcagataagatacttgatatgacttcaattaaaaaaatttttttagccttgttctgtgtcctaacatgtagtcaattctggagaatgttccatttgctaataaaaagaatgcatattctgcagctgttgggtgaaatgttctgtaaatgtctgttagagctatgctatggtttatctgatgtttccttgttgattttctgcctagatgatttctgcaatgctgagttgggtgttgaagtccccagctgttattgtattggcatctgtctcttcctttagatctaatagtattttctttatgaatctgggtgtgctggtcttaggtgcatgtatatttacaattgttatagcttcttgaattgtttccttaattactatataatgtccttctttgtctctttttatagctttcgacttaaagtctgttttagctgatataaatatagcttttcctgcttgcttttggtttccatttgcgtggaatatctctttccatcccttcactttcagtctgtgtatatccttatagatgaggtgagtttcttgtagacagcatatagttgggtcttgtttttgtttttgtttgtttgctttgttgttgttgtttaaattcattcagccagtttcttttaattgggaattttaaccattttacattcaagattattattaatagatgaggacttactccagacatttattgactgttttctgagtattttgtgtaacctttgttccttcccctcctattatttatttttgtggttgggttgttttctgtagtgataagattatttattcctttctctttcttctttctctgttggctctcctggtgaattttataatttcacatatcttcatgagggcagttatcatctttttatttccagatgtaagacgcccttgaacatttctcttggactagactagtggtgatgaattctcttattttttgcttgtccaggaaagattttatttctccttcatttttgaagaatagctttcctgggtataatattcttggctagctgagttttttttctttctgtactttgactatatcatccctttctctcctggcctgtgaagtttctgctgagaaagctgctgctagtctaatggagattcccttatatatgacttgatgcttttcttttgaaaaggaattctcttttagaattatttctttgtctttaccttttgacaatttgacagctgggtgtggtggctcatgcctgtattcccagcactttggaaggccaaggcaggtggatcacctgaagttgagagtttgagaccagcctgaccaacatggtgaaaccctgtctctactaaaaatacaaaaattagctgggcatgatggcgggtgcctgtaatccaagctactcaggaggctgaggcaggagaattgcttgaacccaggagacaggttgcagtgagccgaaaattgcaccattgcactccagcctgggctacaagaatgaaactctgtctcaaaaaaaaaattattttttgactataatgtgccttagagaagacttgtttgggttgaatctatgtgggaactttccagcttcctggatctgaatatctgtgtctctcccaagacctacgaagttttcagttattatgtcattaagtatattttctacaccatctctcttttcttctccttctggaatgcccataatgcaattatttgtttgcttaatggtgtcccataaatcctatatgctgttttcattcttttttcttttctttctttttttttctgcctgagttttttcaaaagacctgtcttcaagttcaaaaattttttcttctgtttggtctagtctgctgttgaagctctttattgtattttttatttcattcattgaattcttcagctctaagattcctgtttggttctttttttttttttttttttgagacggagtcttgctctgtcacccaggctggagtgcagcggcgtgatctctgctcactgcaagctccgcctcctgggttcacgccattctcctgcctcagcctccccagtagctgggactacaggcgcccgccaccacgcctggctaattttttgtatttttagtagagacggggtttcactgtgttagccaggatggtctcgatctcctgacctcgtgatctgcccgcctcggcctcccaaagtgctgggattacaggcgtgagccaccacacctggccggttcttttttaatgatatctctttgttgaatttctctgatttttgttaactgttctatatgtattctcttgtatctcattgcgtttccttaacatgattattttgagccacatgtgatggctcatgcctatagtcctggctccttgggaggctgcagcaggaggattgcctgagtccaggagttctggcctatagtgcattatgctaatctggtgtctacactaagtttggcatcaatatggtgaccttctgggagcagagaaccatcaggttgcttagggagggatgaaccagctcaggtcagaaatagagcaggtcagccaggtgtggtggctcacacctataatttcagcaatttgggagactgagatgggtgaattgcttgagcttaggagttcgagaccagtctgggcaacatggtgaaacctcgtctctacaaaaaatacaaaaattaggctggtggctcatgcctgtagttccagctacttgcgggggctgaggtgggaggattgcttaagcccaggaggtggaggttgcagtgagccaagattgtaccactgcattccagcctgggcaacagagtgagactctctttaaaaaaaaaaaaaaaaagaaagaaaaataaatggagcagatcaaaacacatatgccaattaacagtaggatgcctatgaatagccactgcactccagcctatgcagtatcgtgagaccttcatctcaaatttttaagaaaagattattattttgaattctttttctggcattttatatattccttacgattggggtttgttcctggaaaattattgtgtgcatttggaggagtcatgtttcctcaatttttcacatttgatgtgtccctatgttgatttctacacatctggtggaacagtcacctcttccaatcttatggagtagttttcatagggaaagatttagtcatgtggatgggtcttggggcatcagttggatggctgcattggctatggttctaggtggacacagtgttgtagtttcttttgctgtaatctgcactagtgatgtttgtgagtatcccaatggcctaggctgttagagtttatggcagaagtcatgtagctttactggggttgggaccattggactatttcttaggtcagggacatgtgcatgcacatcatgggttgaccagcttggggtctagcttgctgaggctgtggccatggactgttactctggctgggggcacatgtgcatggctgcccagcttggaggtatgacagcctggggtgggacctccaggctgttcctcttctgggtgcaggcacacagtttcttggccagcatggggtcatatccactggaagaagacctgccagcctgtttctcaggccctgggcatgggcaggcctagggtcatggcctccaggaatgggcctgtgaggctgtttatcaggccacaggcatgggaatgttactgcttgggggtgtgcctgctggcagtggctcacagagctgcttctcaggcccaggacacaggcacatggctgcttggatggcccagggggatatctgccaagggcagcccgtggggctggagtactagtttctttgttttctttttgtttgtttgttttgagacagagtcttgcactctgggctggagtgcagtggcatgatctcagctcactgcaacctccacctcctggattcaagcgattcttctgcctcagcctccctagtagctgagattacaggttcccgccaccacacccagctaatttttttgtatttttagtagagacagggtttcaccatgtaggccaggctggtctcaaactcctgaccttgtgatctgcccacctcagcctcccaaagtgctgggattacaggcatgagccaccacccccgacctggagtactagtttcttaatgacagctccttaactattgttccacttgactgaaaacctatgagctaaaaaggccatttatctactccctttcccgctgtaacccaatatacccaatatggtgtggcataggataatcttctcgttcccagagggggaaaccaggaggcacatagagatcactgatctagagcaattctctttttatgttttctccctatatgcttgtcttagtctgctttgaattgctataaaggaatacctgaagctgggtaaattataatgaaaagaggtttatttggctcacagttctgcaggctatacaagaagcatggcaccagcatctgcttctggtgagggcttaagaagcttccactcattacagaaggcaaaagggagccctcatgtggagatcacatgttgggaaatgagagagaaaggggaggaggtgcccagctctttttaatttaataatcagatctcacaggaactaatggcacaaaaattaactcattaccacaaggactacaccaagccattcatgagggacctgcttccatgacccaaaccaggccccaccttgaacatcggggatcagatttcaacatgaaatttgaaatatccaaactatatcagtggtcttttccatttccgtagctttaaatatcatccatacatttgcaacttccaaatttcctaacatctcaaatgccagactagaatatccaggtaaccatttgacacgttgactaggacatctcagatatttccatcttttttttttttttttttgagacagagttttcactcttgttgcccaggctagagtgcaatggcacgatctcggctcaccgcaacctccgcctcctgggttcaagtgattctcttgcctcagccttccgagcagctgggattacaggcgtgtaccaccacgcccagctaatttttgtatttagtagagacggggtttcaccatgttggccaggcaagtcttgaactcctgatctcatgatccacccgccttggcctcccaaagtgttgggattgcaggcatgagccaccatgcccagccaatatttccatcttaacatgttaaaatgaattcttgatttctactttaccccacttccttcacaaacttgttattttcctggtttccccatcttggcaggtgattctactattcacctagttgctcagaccaaaacccaggactcagacttctttactttctctccctctctcacctctacatccaatcatcaacaagttctatatttttttctcactctttttcttctcatctgggttataacaacttccttattggttaccctccttcattcttgctcccttctaatttcctttgatatagcagtcaaagcaataatttaattcatatgtctgacgatggcactgtcttggtcataatcttctgtgaattcttattaccctttgaaaagaatagaaattccttaccatcacctaaaaggcccatgtatctggtctttgtctgttcctctgactttattctgtgccactttcccctcacccactatgattcacttcctctgggtttctttcagttccttagatataacaagctctcaaaaggttctgtattggccaggcgcagtggctcacacctgtaatcccagcactttgggagactgaggcagatggatcacctgaggtcaggagtttgagatcagcctggccaacatagtaaaaccccatctctactaaacatacaaaaattagccaggcatggtgacatacacctgtagtcccaactactcaggaggctgaggcatgagaaaatagtttgaacctgggaggcagagattgcaatgagccaagattgcaccactgcactccagtctaggcaacagagcaagagtctctctcaaaaaaaaaaaaaaaaaaaggttctatataaattttattccctctgcctggagtattctctcctaacttcccactacgacataactgagtctttttcatcctttaaggtatggcattcctgaccattctatctaagttcatacccctctttattattctctgtcattgtatcctgtttgtttcctctataaaacttatcctggtcttggtgcagtggctcatgcctgtaatcccagcactttgggaggccaaggtgggcggatcacctgaggttgggagttcaagaccagcctgaccaacatggagaaaccccgtctctactaaaaatacaaaaattagctgggcatggtggcacatgcctgtagtcccagctgcttgaaaggctgaggcaggagaatcgcttgaacccgggaggcagaggttgcggtgagcccaaatcacgccattgcactccagcctgggcgacagagcaaaactccatctaaaaaacaaacaacaaacagaaacaaacttatcctgcttttaagttatatcctattagtttgtcatctgtctgtagctcctttaggtaaggagccatgtctgtgttatgcatcaatatatatccagtgcccagagtgcctactcaataaatatttattgaatattgtttaaaggtataattttgttttgagacaatgttataattaatatgtaattattataacgttaaatgtattactttctaattcttttgctgaaaatggccttttatcttttttcttgcagtaattgcccttcctttttggctgctgctttagccagagccacatcagatgaagtccttcagagtgatctttctgcacattatatcccaaaggaaacggatggcacagaagggactgtgggtgagtacctttctacattatttgtttaaaaatactagaatcttctatatgtagtggtccacagaaaatatctgcaaaatactaaatctaattacatttacctgctggttgtttatgtagtggtagcaggggagaaaaaatgcaacttttttcaaataaatcaataaaaggaagggaagaagagaaaaatacatgtgtattttgaaaaaggtagagtagtatttagaaggtaactggagcaacaggagattgtcataagtgatacctacatgaatggaaagattaaagtgaggaatgtgaagatattacaaaaaagatgagtgggtgagggagaattcgagcaaaacctatttgaaatgtttagcttacctttaaaaatccaagttaggccaggcgcagtggctcacacccgtaatcccagcgtgagaggctgaggtgggcagatcacctgaggtcaggagtttgagaccagcctggccaacatggtgaaaccccatctctactaaaaagaatacaaaaattagccggtgtagtggtgcacacctgtggtcctagctattcgggaggctgaggcaagtgaattggttgaacccaggaggtggaggttacagtgagccgagatcacgccactgcactccagcctgggagaaagagtgaaactctgtctcaaaaaaaaacaaaaaacaaacaacaaaaaaaaaaaaccttaactttgtatcaagttaaaagatacaaaaattcaagaaatcagttgtaacacaacttctcactaattatattaaattttatatctaccagtaaatagagctctttatgatagatatgcaaatgtgatttaattgcataggtcattgtacatttttttccagataaattatgaggctctatttcttaatgaagtcatgtttattaatgtcttaggcttatacatatttgacaggatcaaagaaaatatttttataaaaatcagagaattactactcaaaattgttaagaaattttaatatttcatacggtttgttctatttaaagcatttgcctttaatcatggtatatatggagcaaagcatatgttaatgaatctgagtagctagattgaagagaatgtgaggcaaatataaaagtaaacatttctgttcttcctttatctctgtagattgtttgtgacagaaaatcggcaaggaaggaattactcttcttgtttttactgacagtaactgattcacctagaaccaaattgttccagagtcaagttggatagaattcttgctataaagcattggtttttcctctgctactgatgcatagagtaaaagccttataatgaaaagatagattaaattctgcttcactccagccagggtaatggctgattcaactccagctcagaacaatgacattaatgactgatgagtaatttacagctgtgagggggtggactgctactttggacagttttttgcatccctttattattttatttttccatttcaagcagcaattatttatatactgatgtcttacgctactccctgcagaaggagaatacttaatctagaaagattgcagtgttgccctacatgcctactttggaagaattttttgatccctttaagatagcaaaagtgaaatgaagtgttttcttttggtggatataattggttattctgattttttatttttccaagagattacctaataatgtctccatacgactgctgtgattcagactgatctactattattctaaactatttggaaatcttgtatttatttaaccccaatcacttagtgtgaactgcaccacagagaatctctatggggcatattgtgtttatccatacatcagagtaggaaatgagcatactgaataagacctgctgtcactggcttaaagtcctcactgaagtgccttttgtctctcctcttggttgtttccaaaaacagtcttaaaaaaaaaaatccttaaatttcttttcatgtttacattatccctaacagaatgtttgctaagtgaccttggatatctcacttggtacacatttagtttggtagatacaacttttgtccagacaacctaaaaccaatttgagggccagctgttggtgactcatgcctgtaatgccagtgctttgggaggccaaggcaggaggatcacttgaggccaggagtttgagaccagcctgggcaatatagtgaggcactgtttctacaaaaaatttaaaaattagctgggcatggtggcatgcacccgtagccccagccacttgggaggctgaggtaggagaatcacttgagcccaggagttcaaggttacagtgagctgtgtactacaacccggtcaacagagcgagaccctgtctcaaacaatgacaacaacaacccaaaaaaccaatttgaaatatcacagtgtaaaaattattatttttatttttatttttatttatttttttttttagagagagaaagggtctccctctgttacccaggctggagggctgtgggatgatcacagttcactgaagcctctacctcctaggctcaagcaatcctcacacctcagcctcatgagtagctgggactacaggcatgcatcaccatgctcggctaatgtttgtattttttgtagagacagggtctcgctatgttgcctaggctggtcttgaactcctgggctcaagtgatcctcctgccttggcctcctaaaagtgctgggtttatggtcgtgagccactaagcccagcctactgtaaaaattaaaaacaagaagggaaaatgatcactaatacagaggaaatttaaaaataataaaaagtttttgtaaataaatttgaaaacctggatgtcttctagaaaaaaaaaataaattaacaaagtttacctaagaagaaagagattgagaaaattatcgagggacagtcctcacaaaaggccatggagtaggtgactctacaagtgaggtgaacattttcaaatgcaaaggcagataattccaatggttttttttttattatatagttatttatttattattttttgagcagagtctcgctcttccttcaagaatcttcctcccaaaatgctgggattacaggcatgagccactgtgcccagccccaatcccttttaaaatgaatgctccaactgcacggaaaaagaaggaaaatttgcataacataacactgataccagaacctacccaagactaaaaaaggaaatgagagacgagtcttagttgtcaacataaaaaaatcttaagtaggcctggtgtggtggctacgtctgtaatcccagcactttgggaggccgaggcaggcagatcacctgaggttgggagttcgagaccagcctggccaacatagtgaaaccccatctctactaaaaatacaaaaattagccgggtgtggtggcgtacacctgtagtcccagctacttgggaggctgaggcaggagaatcacttgaacctaggaggcggaggttgcagtgagccgagattgcgccattgcaccccagcctgggcaacaagagtgagactccgtctcaaaaaaaaaaaaaaaaaaacgactcatgcctgtaatcccagcactttgggaggctgaggcgggcggataccgaggtcaggagatcgagaccatcctggctaacacggtgaaaccccgtctctactaaaaatacaaaaaattagctgggcatggtggcgggcgcctgtagtcccagctactcaggaggctgagacaggagaatggagtgaacctgggaggtggagcttgcagtgagctgagatcacgccactgcactctagcctgggtgacagagtgagactctgtctcaaaaaaaaaaaaaaggccttgacctcccaaagtgctgggattacaggcgtgagccactgcacccagcctaaaaaaaaaaaaaaaaaatcttaagtaaaatatttgtatattgagtacagcagttaattcattcactgaatattttattgagggcctactatatatgctactatatatgtataatactagggaaacagcagtgaacaaaacttcaagaacaaaatattgggaagtctatagcacaacttttatattaatgggggaaaataaaaataaacagtaatctctaaagaagccaaaagaaacatttgataaaatttaatatcattcctaaattttaaaatattctttataaagtaggcctagatggatatatcttggacgtcacatttatgcttaatgtatattctggaatttgtcagttgtacatgattacaaacacagctttagttgtcttcagcaaaacagaatgtattgactaccttccaggataagggatacacaggtagattcaaggcatcaagtgatctcaacagaacctggcatttctccagctctcagctgtactttctttcactttgattttgttttcaggctccatgaggtggcagtatgacttgctaggaacccaggtcttcatctctccaaactcaagttgagcaggaaaacaagagtagattttctcagttgtttttacagaagccacaggatttactctaattggtccaacttggatggtttcccattcctgaactaatcacttttggccaaaggaatggggttgtctaactggctaaacctgaatcacagggtttcagagtaaagaaagaaggaaatgttattggaagaaaaagcaatgtttgctagttttaaataacaattaaagcaaagttctggccagcacggtggctcatgcctgtaatcccagcactttgggaggccaaggagggtacatcacttgaggtcaggagctcgagaccagtctggccaacatggtgaaattccgtctctactaaaaatacaaaaattagcttgatgtggtggtggacgcctgtaatcccagctactcgggaggctgaggcaggagaattgaggaggcggaggttccagtgagctgagatcacgccactgcactccaacctggactacagagcaagactctgtctcaaaaaaaaaaaaaaaagaaaaataattataataaagcaaagtctgattaaaaatggcaaataaataaccaggaataaagtgattaagaaatatgaaggacttattaaaactctattgagcaacataaaaaggatttaaatttaaaaaacaatataattttttcctggaaaagactcaatatgaaacgatatatattttttccaaatctataaatttaatgtgatcccaaacacaatagcaacaggtttttctgcccaaacttgtcaaaatgtttagaaagttcatctggaaaaataaacataaaactacccaagtgacatcctttaaaattaagagtaataggtaggaaaactagacctcccgatattaaaacattttaaagttatggtaacttaaagagaatggtagcattatagaaatagatgctgagatgagtgaagcagaacacaatcaagaagcatataaatgtttaatattttaatggttatttaatttatataacagtttacatatttattttttcaacaagcatctaatgtagaccctgctatctgctaggtactatactatggcttgtcaagggcaattaagacagtctgtatctgcagtctaatttggagatgaagaacatggacttttgagtcagacagacctaggattgagaatgatgttacctatttgtgaaatgttctagaggcatagaatgtagcaaatactcagtaaatgttatttattattaccaaaagtggttaagagctttaatagacagcgtgaacaaagtataatgggaacacaggggaaggagcaactgggagtggtatgaacagatctagtgatttaccaatgttagaggaaactgatattacttcctctaaccaagttaatctgtctataccagctctgtccaatagacagtgcaatgatggaaatgctccctacctgtgttgccctatgtgggagccactagccacatgtggttatcgagcaattgaaatagagctaatgtgaccgaaaaactgaattttaaattttatttaattttaacttacttttttagagatggggtcttgctatgttggccaggctggagtgcagtggctattcacaggagctatcatatcatactatagcctcaaactcctgggctcaagcaattctcccacctcagcctcccaagtagctggagctgttggcacattgggaccactgcaccctactgattaatttaaataaccatggccgggcgtggtggctcacatctgtaatcccagcactttgggaggccaaggcgagtggatcacctgaggtcaggatttcgagaccagcctgactaacatggagaaaccccgtctctactaaaaatacaaaattagctgggcatggtggcgcatacctgtaatcccagctactcgggaggctgaggcaggagaattccttgaacctgggaggcggaggttgtggtgagccgagattgtgccattgcactccagcctggacaacaagagtgaaactccatctcaaaaaaaaaaaaaaagaaaaatgtaaccacatgtagttagtagctactgtacttgacaatgcagatctacataagagtaatatacaagccaaagaatgatataatagtttatattattatctgggaactatcctgatagttaatatgttattcgtttcaccctactccattctccctcaaagtttctaaattcacttgattgttttgtaatcctgttatggctatgtcagatgaggacacatccatctcagggtctgcatttgggggcctatactgctgcagagaccagataggttgcagtgatacaagcaggtaattgctggctggaagaaatagtctctggcagctagtgcttaaataaaaattggagttgctcaaaacaatcaaaatgttggattgtctattggcctcagtttccttcttctatatacctccacaggctgtctttgctctttgtcttttctcttttaaattcacccttggttttcagttacataaaaatgctaacagtagggacaggcatggcagctcatgcctgtaatcccagtactttgggaggctgaggtgggaggatcacttgaggccaggagtttgagatgagcctgagcaatatagtgagaccccatcttaacaacaaaaaaaatttttttttaaattacccaggtgtggtggcatgcacctgtgatcccagctacttgagaggctgaagcagaaggattgcttgaccccaggaatttgaggctgcagtgagttgtgattacatcaccccactctagcctgggcaacagagagagaccctcttatttaaagaaaaaaaaagctgggcatggtggctcatgcctgtaatcccagcactctgggaggccgaggtgggtggatcacctgaggtcaggagttcgagaccagcctggccaacatggtgaaaccccgtctctactaaacatacaacaaaattagctgagtgtggtggcgggtgcctgtaatcccagctactcgggaggctgaggtaggagaatcgcttgaaccagagaggcagaggttgcagggagctgagaatgcaccattgcactccagcctgggcgacaagggtgaaactctgtctcaaaaaaaaaaaaaaaaattggccgggcacagtggctcacgcctgtaatcctagcactttgggaggccgaggcgggtggatcacgaggtcaggagttcgaggccagccatttggagaccatcctggccaacatggtgaaatgccatctctactaaaaatgtgagaaaaaaaaattagctgggcgtggtggcaggcgcctgtagtcccagctactcgggaggctgaggcaggagaatggtgtgaacccaggaggcgaagcttacagtgagcccagatggtgccactgcactccagcctgggcgatggagcaagcctccatctcaaaaaaataaaaaataaaaaataaataaaaattagccaggggtattagcgggcacctgtaatcccagctactcagaaggctgaggcaggagaatggcttgagcccaggaagtggaggttgcagtgagccaagattgcaccactgctctccagcctggaccacagagcaagactctctcagaaaaaataaaaaataaaaataaagaagacaaaaccacaagacacgatttaccaccctgtgctatgttaatgaggaaaaaaaggacaaaaccttgaggtcagcttttttaatatagccatttaaaaaataattttgaatacgaaaagaggtaaacgtagtcacagattaaggcaaagacaggactgagaatcaagttgggagtccacgtcccaggctgttctagaacatatagtctctctcttctttgggatttgtattctagattggaggaggcacgtgtagccattgccatctgtcacttattttctcaggctgtcaagctatgtctgatttagttaagtaaaaagaaaatttaagttcatttttttttttcacctgagatgtaggaggaacttctaaaatactggcctgagaaaacctaatctctctttggttatttcagtagctcaacttaagtggagggcaacttgagtggagggttcaatgataggaaatacaatctcttcagtatcattcagtgttgcttaaaaggcttacacatgtgtccatctactgagggtacatgtctgcctcagaagtcagctcgccaattctacccaataggtgaagcggtagacataggtgaagcggtagacataggtgaagtggtagacataggtgaagcggtaggtttagggtcaagagacctgttagtattgctcctctggctgctctctgtctttttctatctaggatcacacgcatagacagaacttaagtaatttttccttagagtagtattaaagttttaactcatttgctaacctattggctaaactgtttaaactatggcctaaaactttaataaacaaataatatcaaacagaaaaaacaggccgggtgcggtggctcacgcctataatcccagcactttgggaggccaaggtgggtggatcacctgaggtcaggagttcaagaccagcctggccaacatggtgaaaccctgtctctactaaaaatacaaaaaattagccaggcatgatggcgggcacctgtaatcccagccacttgggaggctgaggcaggagaatcacttgaacccaggaggcggaggttgcagtgagccaagatcacgccattgcactccagcctgggcaacaaaagcgaaactccgtcttaattaaaaaaaaaaaaagtatatatatacacacacacacacacaattcagttacaaatgatgatcatttataggagaaaaaagggaattggatgtaaaggaagaagtcagggagaaagaggacaaagacaaatggtaagcaacgtaaacccttcttatttctgtagtttgtgggctgttttcgtaggccttccatattccaataaacactgtatttatccagctaattggactacggaagcagtgttaatcactgcttatttttctaagcataggaggcttggctctcctggtgataaccataccagacaaccaaaaagaaaccggtgctgggaactagggagcagtgtggtgagagcatttctccagctggaagaaatcaagccaggaataggtccagccctggccaaaggttttctcctcatgacataagaatatttagtggcagctgcaggctgatgattttccactagataggttgtgattttctctcttcagaagcagcatttcatttttcttgagaaggatgaatttcttctatgaaggaggaacttgactaaggtgacctacttctgtctttaccaagcagagaagtgaaaagcagttttacaaggctcttcattgggggtttctgtgtttctttcacagagattgagacagtgaaattggcccgttctgtcttcagcaaactacacgagatttgctgcagctgggtgaaagacttccccctccgcaggagaccccagctttattatgagacatcaatccatgccatcaaaaacatgcgcaggaaaatggaggacaaacatgtctgcattcctgactttaatatgctcttcaacctagaggtaaagggcactttcggagagtcagtgagattttaaagacaaaacaaacaccttcatggtcctgttagaaaaggaaaacttctgttatatttctaattgtatctctggtagattagagtagggctaagtgcaaagtggcacaaatttgcaacagaaaaggaactattttacgttcttttgaataggtaatgcattcacatggttcaaaattgggaaaataaaaatgtctcttatccttgcctcccaggtactcagttcccttccatggaggcaaggtagtcttttgtgtcaccttccagagctattctataaacatataagcaaaaaagaaaatgattaggctgggtgtggtagctcacgcctgtaatcctagcactttgggaggctgatacgggaggattgcttgagaccaggagtttgagaccagcctgggtgacagacatagtgagactgtctcttaaaaaaaaaaaagaaagaaaagaaaaaacaattaaaaaaaattatatctcaataaagcagttttgtaaaaaaaaaaaaaaaaaaaaaacccaaactatttctatagtataatcaaatggtgtattaagttctcacattactatgttgctgaagcaacacaaacacaaaaggaagatttaagactgacgcagtttatttcatgtgattttctttttaaaatcttggtctctgagataggaaagtagctggaattatatttcataaatctctgtatctgacaaattggatctatatgagccttggcagcttaataactattttcttgttatctttcttttctttttctattaaatgtattatgttaatgcaaacaagtaggtttgttttctttgcctgtcacttgcctcttttcttcactcaagtccataacttaaaaattacaatgtagtaatttatacaaagcacaatatttcctctgtttagcagctaaatttacattttagctgtcaaggtctaatcagcaatgatggcaggttggtaattggtgtttatgttataaagatagatcagctgatgtctttgtttctagtaccatggccatgcaaatgtaacccagaaggattgtgtgataaacaatccttatatcactatacctacttgaagattatactcatatttggggcattgttgttgttcgttgacttccttggtttctgttttgcctcctaatttcaaaattagcccaaaggacttaactcagaaaggagaaccttgctatagtgaaatagattttaagagcaatatggcaacacatatgtagaacctaataaattttcacactctttgatctggtcatttcacttttaattctttattataagaaaatagaaatgcagaaaagtcttaggcatgtgttttgtttgacataaatgtttttacaacattgtttataataaattgaaaattatctaaatcatgaaagggaatgataactatgatatgctcatataagatgcatattttaagccatttaaaacaatgtctttaaataaatcttagtgcgatgaggaaatgccaataataaaaatgacgaaaagtaggctataaaatgtcatgcacattctgatcctaatttcatttatatatatgtgtatatatatatatatagagagagagagagagagagagggagggaggactggttatctgtgtatggtggaattattagtgatatttcctttgttattagtctaaattatcatacattattataatagggaaaacatcagtgaatgttttgtgtttttttaaaaagaagctatcctttttttatttttttaagaaatccacttagcttccttttgtttcttgtggtgctatttcgagttgtttaaaaatgagtactgctttagtagggatagaaattctacctgtcagcattctttctttctttttttttttttttgaaatggagtctcgctcgctctgtctccaggctggagtgaagtggcgcgatctcgactcactgcaacctccgcttcccgggttcaagagattcttctgcctcagcctcccgagtagctgggagtacaggcgcgtgccaccacacccagctaatttttgtatttttagtagagacagggtttcaccatgttggccaggatggtcttgatctcttgaccttgtgatctgcccgccttggcctctcaaagtgctggaattacaggtgtgagccaccgcacccggccaggattatttctagagagttgtttaatccgtccttcatgtcattaaagttgctgaaagaactagttgtaatgtgtgtgttagacaaaggtttcataacattttggttattattctatggacatttatatttgatacttttgtgaatgtaatatacccttttaaaagtaactttttcagccaggtgcagtggctcttgcctgtaatcccagctacttgggaggctgaggcgggatgatcctttgagcccaggaattcgaagttacaatgatctgtgatcatgccactgtaccctagcctgggtgtcaaagtgagacgctgactccaaaaataaataaataaaaagaactttttcaaagtacagatatacttgttattttagtagcccttccaaatccccatgagacagcaactcgtccctgcctaacagatgagaaaactacatgatttgcttaagaatcaatgacaggcctggactcctctaaggctcttagaacagaaaaagaagtcaaaagacttgcaaatgaaaattattacatactgttgcctgaagggagctcaggactcagtgcgagttcagtgcgtcacagatctcctaagtgagacagatctgagatttaaacacttgagcagatgataaagcagcaaactgcttaatggttgatgtggaatcttatgattaggcttttgtcaagacaaagcacagggttggaagatcctcctctggcagtttactttgcaaggaaatgtgaaactaaaatcttagatcacggggtgaggcaaagtggtcagccgcacagggcatttgagcatctgatgtggttcaagtttggtaaactagtttagagatgctgtgctatttgtggtgagaatgcagtgtgactgggaatgatttatgaagaaggtattatagtttagaagtatgtttatgctttcatatctttatatattttaaacttgatttaattggccttgtgttggaagaccagttattttctattgttctcaggttctaattttgctattaaagtactttcattttgaaaaaaatcactcaatctggagctgcttttgttcaattccttctcataccctccctatcccccctcccccaacttgtaacagcaattttgaagcaaatgtacgtgggtggtttccatggtacaagacaacaactttcacagagagagggcacttcagcttgagctaattgggcatgacatgttccagtgttctggtgtgtaaacacagataccctaatattgcaggtatttcagcagttgatcaggcatgttagagaaggaaaacatttagtctcattattctgaatgacaaatgcagtggaggagaaaggatgggcaacaatgatgccaggagattggttcatttgaatcatgctatacccaactcccataactgttctgtgtttctgttgacaggaccaggaagaacaagcttactttgcagtgtttgatggccatgggggagtagatgctgctatttatgcctccattcacctccacgttaacttagtccgccaggagatgttcccccatgatcctgctgaggccctgtgcagggccttccgggtcactgatgagcggtttgtgcagaaagcagccagggaggtatgcccctttctcataagttccagctagaaatgtactagctgagctcaatttggtctgtgtggttaaagggctatttagattttctctttctgggcagacattatccaaactgtattcttgactcacagtattggattctgttgtagttccaattccctcctcaggaagagtttcagggggtacaatgaggtactgtatagaaaatctcaagctgtaattttctggattcatttctgtaataactgctggatttggcaggtgagtttcatctttcttttattcaccattgcctgtcaggttcacaccaggaccatctctctaagcagactcttgctgacaagatctggatatggtgaataaaacaatggtctaaaaaagaaacagaaactgggattacttccatacatttggttctaaatgggtaggcagtgttttgctgtgtatctcttgagggaaaattcgcttggagagggtgaatccttaaatgatccttgagctgatttttctcttaatagggagaaaagaagagctcatgtcctacattgcgaaggttaatcagacctaagttttttttactttgaataaatggcaagggctctatattaaggtctaaaagtaaaaaaattaatctaattatcgttctgggtattggtacataattaactacagtgttctatattggatttttaactggggacgaataaaagaatttttaatttttaaaaataattacagaagtagatacagacaaaaaataagactcctgccctgtgacttaaacattaactcttttcaaaatgggcttggagagatcagggtaatcatttaatccattttttgatagcatagttatgctacaagcaataatggggcttagaattaatgaaacaataactcagacctatttggtattaagaaagagaattattcttcatctctcccctcccctaagtttggattaatatgcaaatccaacagtaaccagtagagtccacacaaagaggtgggtctggagaataaagccactcttgacctcagagctccagtctcttgaggacctgcattctgcttggctctgcctctcttgaagctgtgggcttttatcatctgagtcgaggacaagggccggcccctgagaggtgacccgtaatcatcaatgtgaaacaaagagattcactctgtcttcttcatcctctattctattctttttttcctctgtcttctcaaaattatgtgttgttgttgttgttgttgttttctgaccatgtttacctcatttgttttgtcagtgaccctggtgtctctcagttctgccaatagttctgaataatttaggtttgtctcagcgccccttttctccttcttatgcttccatgtgctgctaactgctgggaagaaaacagctattcctgttatgaagcagccctgcctcctgttctctccagggcatatgcactgaagtgtgtttatcatgtgttctagggggctgagtttttgaacattctgtgtgggaagacattttattggtgggtgaggatttataacaaactttccctatatagggaaaatgagaagttgtttttctcattggatacaagagaccttttaccacccctgacgcattggttctaatttaggccaggtccttagtaacagaaagtcatgctcatttggtggtgactcatgtcaaatggggatgtcattttcgtatagtaggaccaagagctttaagtacagtcgtagctactgcagtgaaattccaggctgttagttctttatgcaatgttccaaaagcaaagacccctaaaaatactgtaggaaggatatttttttaaaggtataagcatcttagtactccagggaacgtaagctgtctcttggccccttagcttaatttccagagattagagcatctgttgtgtaccaatcagatgttttatatatcattttatacagctaggactctcccactgaacaaatacgatgtcagtaatgaaatggagagcagaatatagaaatttttactctgaggattggtatagaggatttagtgcttgactgggaggaaaaagaatttcaattctgtcttatatactaatagttacctgcccttgggcaagtcacataacctgccatagttttcttatctatatttaaagtggaattaataatcatcctcgccctgcatatcacagatcaggtggacttatgtgtgtatatacacataaatacatacatgcatatacaaatgcattgagacaatgaattattatatatgtgtgaaattccattattaatagtatagctcccagctgaaaagcttaattataaattgcttctcaataagaatgtagtatctatttcttttcactgagtctagttttatttaaactgttttcagagcttaagatgtgggaccacaggagtggtgactttcatcagaggcaacatgctacatgtggcctgggtgggtgattcccaggttatgcttgtgagaaagggccaagctgttgaactaatgaagccacacaaaccagacagagaggtaagtatggtctgttttaatagagcccatgctctagttattagtttagattttctagttattgattaggattcacttactttttttttttttgagatggagtttcactctgttgcccaggctggagtgcaatggtgtgatcttggctcactgcaacctccgcctcctgggttcaagcgattctcctgcctcagcctcccgagtagctgggattacaggcatgtgccaccacgcccagctaatttttgtatttttagtagagacggggtttcaccatgttggccaggctggtcttgaactcctgacttcaggtgatctgcctgcttcggcctcccaaagtactgggattataggcgtgagccaccgcgcccggccaggattcacttaattattacaattattgctatcacatcagcaactgtgcccaccctccaatggagaaacaaagagaaccttttcatgagctgatgagtattatatctgttgtttactgttaaagtaaatgaataaatcctgaatccagttatttgcttctttttattgcattgctgtttaggatgaaaagcagagaattgaggcccttggaggttgcgtagtctggtttggtgcctggagggtgaatggaagtctgtcggtttccagagctattggtaggaaaaacaaatttttgtttctccaaactgtcctcttctagctcattctcctgtatcaactctgatacagggaacctgagatgataatttatgttaccagaatgcttattattctttaaaataataattggataacgtctcttttaattgtttgatttagttaaacctgtacatttatatacttaaattccattattgaaagagaactgccaggctcagtggctcatgcctgtaatcccaacactttgggaggccgaggcgggtgtatcacgaggtcaggagttcaagaccagcctggccaacatagtgaaaccccatctctattaaaaatacaaaaaattagccaggcgtggtggcgggcgcctgtaatcccagctacttgggaggctgaggcaggaatattgcttgaacctgggaagcagaggttgcagctagtggagatcgcgccattgcacgccagcctgggtgacagtgtgagactgtctcaaaaaaaaaaaaaagagaaccatatcaagaaatgcagaattttctagtttctatacatttaaaattttatggaagcctttaatcagtacccaaatctgcttcaaaccacagtggttgggacaggcacagtggctcacgcctgtaatcccagcactttgggaggctgaagagggtttgagcccaggagttaaagaccagcctgggcaacatagtaagacttcatctcttaaaaaaacaaaaaacaaaaaaaacaaaggccgggcgcagtgggtcacgcctgtattcccagcactttgggaggctgaggtgggcagatcatgaggtcaggagatggagaccatcctggctaacacgatgaatccccgtctctactaaaaatataaaaaattagctgggtgttgtggcacacgtctgtagtcccagctacttgggaggttgaggcaggagaatcacttgaatctgggaggcggaggttgcagtgagtcgagatcgcgccactgcgctccaggctgggcgacagagcgagactccatctcaaaaaaaaaaaaaaaaaaaaaaaaaaattgctgggcgtagtggcttgtgcctgtagtcctagtacacaggaggctgaggcggaaggattgcttgagtccaggagtttgaggctgcagtgagccaagattgtgccactgcactccagcctgggccaagggagtgagatcctgtcttaaaacaaaaacaaaaaatcatagtgtttctcatttcattgcattttgggtcaaatcagtatttttcagagaatggaagcctttctccgtattttatccacattcattttgtttatgcctctaaattatttccatgaattttaaaatgacataaataacagaataagttgataggaaaagcattgtgctttttatatgaaaactactttctgtatgtggaatacagtcacctgtcagataaccctggagtttcaaagaaccctatatccctgggacttaaatttttcaaaagaagggaaagtcaatgaaactcggtctaaaacgtagagattaaacagctaagttggctggacaaaatacaagggtataagttcaaagaattaagctatttctgtctttgtctcactttgggccctgggtttattattttaggcttcatggcttagcttcacttcctgtttttttaaaaaagaataaatcaatatgtatatctatatgggtgatatgtacattacatgtatactgcagtttttaatctctgcttccctaaagaaatgaagtaattagacatggttggaattcacatctagtctcaaaatttagttaaaaattaccaaaaattccagaacatgaagaaaatctgaaaggatttagctttcaccactgatttgagttcctcccactctttgggaaggtgctagcaagctgtgaagtggcccaaatatgagtagaaagctgaaagagaaatagctaaaagagtctacaaatacctcctgaaaaattgagatttggcttgaccttagactggagggaattattaggaactctagaataaggccaaaaaggggaaatgtctcatttctaaaatatacccttatatggaattattattattattattggtggggaaaagtctttatcatgcacattgtaggtttagcaggacccactacccatcaaatgctacccttgactgaaaatcaccgaaccagaggactatactatctgtggaaccaatttacgttaatgatcattatatgagtgcttgagtggccagtgaattaggtttacaactcaaaccaaacacctatttctcctgatctgacctttgtcagaggattgaggatcatctttaatacttgttacagaactaacttaatagagaataccagcttcttcttctaaaagggaaaaccaaagcagggaagaatgtcccttaataagtgacaatctcagagaaaaggctgggtatggcagccagcactgtggaaggccaaggagggaggaatgcctgagcccaggattttgagaccaacctgggcaacatagtgatacctcatctctattttaataataaaaaataaacaatctaagagtggataagggagacttcatacatagagtgacttttgagttgaatgtggaggataatgtgctgggaaggaaatccctacacaggtagagggaaatataaatacacaggggtttgaaaaggcatggcatgttttaggaaaagcaacaagtccaggaggttagagcagagatgggagtggtagattagcagtgttggtgccagattgcaaagggccttatgtgcgaggctaagtagtctggactttaccaggtgaatacgcagaggggccacagggtcagctttgtatttataaagatatttgtatggaagctgggctagagtagaaagagcctggctgggagacattcatacagtttgttacagagatgaggagagctaaaaaggaatatggaggagggtatcaactgatgagatggattggttggtgggaaaacctactaatcaacaaacaatctggcactggaaataggcagtaacataaaggagcaagtgtagatttagtttcttgggcagtttgatggtgaaggggagaaaggaaatagtgtggtggcttaaggcaaaagctgattcaggaaagggttcctttttattgtttctatttttaggacgaggagattttagatttgagcatgtttgtaggacaaggaagagagcaagtagaggagaaattgaagacgagagagtagagaagccagagcagcacaggctcactgttaggatgggaaaaggacactgcttaccctgagaaaatggtagctgatatgggagaatctctacagattaaacagtgcatgtgtggcaagggtgggaggggaattgagaaaattcaagcctgatcaacttgtctttgaagtaggaaattaggccatttaccaaaatccagtagcttaagtggatgagggagttgaagaatttgagaaagaattggaaaccacatggaataaaatggggggctgcaaaaggacaagaaaaaggactcctgggcagagttcagctctactcaggaaagaaatgatacttataaaaatgaaaaggttttcaacagtttctccccatgagcccttcagatttatgatccaaagttgacagaggcatgatatgtttcctaacatatggagagaagaggttgaagacaaaaggatgttgccatttctacgatgaaatggatattcatgccctcctaccaaatttgggggcgaaatgtcatgaatttgacacccaacagtagagcaggtgaaaagccagaactttggcagcattttctctgtacaaatctttgtatgttctgttccaaactaacagttgcagcagtcttttaattgaagcactaaaacaagatttttgggaacagtgtgactcagatcacatttatttttagaggcggaattcaaaaaataataatgatgataatcatatagtcaggtagaataggggatgggaactttagtaaattggtgaaggacactgaatcccatattggattttatttattatttatttttaaatatcttttaaatttttgcattttctgcttaaatagattgagttttaatgagctctaacaggctatggaggcaccttagcatataagtgaagttgattaaatcaaaagcatgcttgggaaagatggttttgactcctgtaagaaataatgaatgagggctgggcgcggtggctcacacctagaatcccagcactttgagaagcccaggtgggtagatcacaaggtcaggagttcaagaccagcctgaccaacatggtgaaaccctgtctctactaaaaacacaaaaattagctgggtattgtggtgcgtgcctgtaatcccagctacttgggaggctgaggcaggagaattgcttgaatccgggaggtggaggttgcaatgagctgagatcacaccactgcactccagtctgggccacagtgagactctgtctcaaaaaaaaaaaaaaaagaaataatgaatgaatgaatggagaagagcctagatatgagtaagatgagaggttgtgtttgtgaatggaaggagtgaaatgaacatttataatgtcgaagactaatttcttacctaatagatatactaactcaggtaattatattaattatttgttgctctgtgtatctaatcatgcaacctgctagatagggcatgtgcccacattggttctagcagagttatccatagggttcctaatgagctttctagcctatttgaggattaaacagggatgttaaatgttggaaagaaacttttttttgagacagagtctccctctgtcatccaggctggagtgcagtggcgcaatctgggctcactgcaacctctgcctcctgggttcaaacaattctcctgcctcagcctcttgagtagctgggactttgcatgcatgccaccaggcccggctaatttttgtatttttagtagagacaaggtttcaccatgatggccaggctggcttcgtactcccgacctcaagtatcctcccgccttggcctcccaaagtgctgggattacaggcatgcgcctggccaactttcttgtgtcaaagagaacctataacagatactagaaataatgaatatatagtcagattactcaagtgagtttatcttcattttaatattccctgagtcaaaaagttcggttttagtgcaatggaaaggatagtaattgatgagagttgtgtaggtgacaagtagaagagctaggatttggacccaggcagtctgacactagtgctggtgtccttaaccactaagcaatatgccactgctatacagtaaagccctttgtaaatatctggagtttatttcttgtttttataatactatgtaatgatgatttatgataccctactctaggaattattgctcagtaccctgtgtgtggttttgtttttatttttttgtaaagaagtgaatgagaggccagatgcggtggctcatgcctgttatcccagcactttgggaggccgacacaggcagattatcagaggtcaggagttcgacgccagcctggccaatatggtgaaaccccgtctctaataaaaatataaaaattagccaggtgtggtggcgtacgcctgtaatcccagctactccggaggcggaggcaggagaattgctggaacctgggaggcagaggctgcagtgacccgagattgtgccactgcactccagcctgggcgacaaaaaataaaaataaaaataaaaaagtgaattgagagtcccttgttgtagtcataagctatttggttacctcataggctaaggacccttttgctgcactctcacaaggtacctaaaggaatgtaatcaatgtaaacaatgaatggatttggaagtgctctggatctgaaagccctaaatgatcaattatctcagtagtctggtgatagaaacctagtttagtgtggtcccaaggtctgcagtctcgctcctaccccaagcaccctactctccaactgtacattactccctaacagttgcctctgcctttgcttatcctgttccctcaattgaggcaacttctctgcctggtgataactaacttacccttcaggaccagctcagatgtcattctgtgagaggacgaagctaagcaagaaaaggaagagagaaaggcccagaaagaccttgggttctcacagttgttaatgagtggggaaatgcacaataacaataaagacagaagtggggcgatgagcagagccatatgaagaatatggcagtctctaaatataagagaaaaatggccatacattttgtctgttctctagaagttacaggtaaagcaccactaaaaaatagaaagccaagtgggttgggaatcaagaaaactgcattcagctcccatgtgtgaggccttgggtcagccacataactcctcctggcttaagggagttagacttgatttataaaatctcgtgtaactcaaaccttccttcgtgctcgcagcatgaagctatttattgatttctaaacaagaatagaacaaaaattatttaatgaagagaatgatcagagctttggtttgcttctttcaatgtggacttgttttcaaatttcaattaaatcaaaaccacctgcaaaagaacagatctactgaatcaaccatgtcttcctacacagtgtactgaatttttcagtacagcaacaaacttttagatctgacattgttgttacactcagctaagcctaaatcatagccagaggtgcagattcagagtctaagctaggtaaggacttatgcccagtaactagcaattatttaactgggagtaaggagtaagcagatctgattaccagagaatttaagtattttgtcaaaaactattttataaattctttccagtcaagtcagttcacaatccagtaagctgtgatcagagtcatggcattggtcataaacgttcttagcatgcaaggtaaaacaaatgctaatgatgcccctacactctgcttcccgcaggagatgctgaacataagccatatatctgtggggatgcagattctgcctccactgttctggatgggaccgaagactacctcattctggcctgtgatggcttctatgacaccgtgaaccctgatgaggcagtgaaagttgtgtccgaccacctgaaagagaataatggagacagcagcatggttgcccacaaattagtggcatcagctcgtgatgctgggtcaagtgataacatcacggttattgtggtattcctgagggacatgaacaaagctgtaaatgttagtgaggaatcagattggacagagaactcttttcaaggagggcaagaagatggtggggatgataaggagaatcatggagagtgcaaacgcccttggcctcagcaccagtgctcagcaccagccgacctaggctatgatgggcgtgtggattcattcactgatagaactagcctgagcccagggtcccaaatcaacgtgctggaagacccaggctacctagatctcacacaaatagaagcaagcaaacctcacagtgcccagtttttgctaccagttgagatgtttggtcctggtgcaccaaagaaagcaaatcttattaatgagttaatgatggagaaaaaatcagttcagtcatcattgcctgaatggagtggtgctggagagtttcccactgctttcaatttgggttcaacaggggagcagatatacagaatgcagagcttgtctcctgtctgttcagggttggaaaatgaacagttcaaatccccgggaaacagagtttctagattgtctcatttacgccaccactactcaaagaagtggcacagattcaggtttaatccaaagttttattcatttctctctgctcaagagccttcccacaaaataggcactagcctgtcctcacttactggaagtgggaagagaaataggataagaagttctctgccatggaggcaaaatagttggaaagggtacagtgaaaacatgaggaagctcagaaagactcatgatattccatgcccagatcttccttggagctataaaatagaataatttttctttcaagtaggttagctagctctcccccaataaaaataccactatcagagtagaaacaaggtagacatttctaaaacatatgtgcttcattatgaatccatggatggctcaattcttaaatgtaaatagatctctaggaaactcaaagtacagtgttttcaatctaaaaagaagtattggcagtttcacttgcaaaattacacagctggtccctgtgatgtgtctcgacaccaatacacaacccccttcccaccatccttcatgtcactagatacacaacccccttcccaccatcccttcagtcactagtggaagctttcaagttagttatttcagtcaggatatacagtgttgaaatctcaatgcagttgaaatctggtctgatgtgcctaatttatctgtggaaaatttaatgctgaattacatttggttgggaaatgtccctcaaaatcctgggcactatgaaggaaccccctgccccctcacctttttgggtaggtaaaagactaaaagccatatggattttaactgataacaatgaaagtggtaaatcagtgtaaaagtgtcatattctcagacttgtgaggcggtttatagtcagaaagatttacggatttttttcctgtaacataaaagattgtgaactttttttaattaaaaaatatttcctagggctgtagttatttgggagtttcataacctgttatggtgcttttggtggaatttttattatttagcattttaggagaccgctgtcaactggttttaatctatgatgctaatgtgttttccactgtaccctcatctcaggaataaaactgctttaacggagatgatgtcaggtacaaatacactatagagtcaaaataccatttacaaagaaaatcaaaagcatttctatattttgtctttttttagttcagacagcaaaggcatgtactactataaaatacaaagtgattttagagaatgaaaaatgctacttttatcttctctaaaattatttcccccaaggtagtgaagtaattggaatgaaggaggctgaaagtattgtctaaagtgagcccagaggccactgagaatgcagattactgacagccaggtctgtttagttgtaattggaagacacatgagtgtcctgcttacatgtagcttcagactgcagagacaggacgtgtgcttttcatttcaatatttagttatatttgatattttgaaactgtctgctttttgctatttctgcagtttcaagttagttagaagcatgttgtcaactaaagacaacaaactatcagattcattcattcagtgaagcagcctctgattctctaagagtcacgaatgtcttagtgttaccctcccctagtcaacagcagaccagcctggccaatgcctatgggtggcccctctggagtgctcactaacaagggtgagtgctctcgctaagaagtgtcccccgcctaatcatgtgtttataggatagtacacgttccccaggcccataacagaggactaaaatctctgaattttaaagacacagatgactggcatattttggataccagtatagctatatcaaatagacaaaaacagcttcactttagcaatgatcagattgttaatctacagattttattttttaaaatttggatgtaagtagagactttcagtatttgttttctcttgattttgaagtcatttcttcttctcacgtctgtgacaaatggttgaaaaggagtcaacatggccccaactatagtgccggaaccttttcatcattctgaggctttgccccacacatggtcctcactcatatctgtcaccttctgaagcctagatcttgttaacccatcaggtgcagtgtcagtttcaaatcaaattatctaagaaaacaagaaaacaaaggcagcagactattggtacacattatagtccaaagtgcttagcgaagtaaaaaaaaaagctttttaaaatttctattgttgtctattggtaatgtttttgatcagaataaagagggtaaagggaaaaagttactacacatgctaggctttctcagtggggaaaaaaatggctggatagaactgggacaaacacagacccatctttaggggtctggattttgtaggtccgactacacagcagtgttaactcatttctcatgccattagctctctacaaaataaagcaaagtagttctagtgtggtcgttataaaccaatattgtgaaaaatagcaactattcatttgttcacaacatgcgtatttatagagtagttaggtaccatttgtaaggtaaatcctttaaaattctataatacatactaaaatagtggttattggtctgatatatgctgctcttggttctataaactagataaaagcagtgctttgtgaaatgcagtgttctctcttaacgccactggtgataggaagtagttcccttcagttcaaatcctgtgcccttatttgctgcttgctgacgtaagcaataagtaaccctctaactaatggtatctacatatttctgtaacttgtatttaatgatggtgtacctggtgattgtaaaaatattagacagatataaaagtatctatataatatctataaactgttaatgctgaggtatagtctgtgaattatgtgttttgtatttttattcattgtgtaatttagtggtggtgaaagttctacactcaatccttaaagagtggcagtatccctttttcaatttaacatggtctgcatcaatctgtttgcctgctaaacaagttagaataggaaatagtaaaataaatccaaacaagagtgtaatattggttagggaaacaaacttcaggtcaccaactgaagtcattacaaactccttgtacattcactgtgagtttcaaagggagtcagtccctaatttacaggtttcctttgttcactttctagatgtgtacttttgagggacatgaggttaggcaacattacagcaacacacactggggctattaatcccatttaggtctgtactaaagaggatgggtagaaacacatatgtatataccttttctttacctagaagtgccatccattgtccttgaattattatgattaaagttactgttgcatttaggaggctccttgaaagtaacaccttttccaaggacaatggcaacaatgtcaatgtcaacactgagtctaattttgaccacatttatagtggtatagtgtcaatactgcattttcatgacaaccacactccactgttgaaacactgtgccagtgagaagtgcaacatccagtgggcagatgaaaatgatgcatggccaagttcagtgtttacagataaaactgctgtggttcaagtgcttccttccccatcaaatccttgataaggctttgtgggaaaatgatctaaattattgttttaatttttaaacctaatttattcactcagtgaacattcttacctaagcaaggctataaaagggaatactacagttttgtccacactttaatttgagaccatttttctttgaatcgtaagttagcaaaagaaatttttttcacctttgaaaatcacgtgatgtgaaaggacaaatgcccactcttctattctgatctgcaaatagcttaaatgtctcttgcaaaacaaagtaagataccaccagtattacaacacaatgattttccagacaaatggtatggtgttgaaaaataactgttacttcttaaagcagcattttatcttctattttgaagactatttattgtaataattagaaaacatgaaatagggaactccagactgacacagcagttgtttttgaaaaggaaataaactttgatgaattagataatccagatacatcattgtaaactcttactctaggtgctctttggtgagagacaggctttgttctcttgttcataacatttctctgcaaagaattctctatggagtgaagcgaatgaagtgaataatttcttaccaaataaatttatcaatttacaaatctgctctacatctcacttttgagttcagttgtagtcatgagtgatccttcatattttattaaaagtgttcattcaggtaaggtgtatgttgaaattttgccaattatcttaataaaacctggcaatttaaaaaccactagtcatttgtctttttatttaaaggaaaggtaagttatttactgtttaaatttgtgcagatttcttcagaactggaaaataaaatcctgagatggacgttaagtttggaagcttggaacatttaaaaagaagatttgctaaatgctgctgtaacattattttaccccagaagagaggtatttagccttatacatgttctcttcattagctgaactgcgaggagagggagtggtgttataatcctaaaagaaaagaggaacccgacctgccaaggactaagcggtggtcatcaaatctcccaactacttcattcttagaactctgcatctaaccaagctttcccctttcgcttagcctctttgagtttcaagctagaagaaagtaaggaaatcatcagatgagctgtggtggaaagcctcccaaggactgctgataagtgagtaaaaggagacagagacaaaaaggacaatgtgggggagggaagtcacttacgacacctgcatctgaagggagggaactgaccttccaaacgagtcaaccttgtcaatacactgcactgttctcctgcctaccagtaaagaaggcctttacaattaattttacatagtttcaaaaatcttcaactcctaattccctaaattcattcagtccttggcatgactttatatagaaccaaatgaacaattgagaaaaaaaaggtgaagttttgaaagaaggacatatttgaaggggtttactgaagcagggaatgacagaaaaggaacattttgattagtaagtgttacacttgaaaaaattccctaaaatatagtattacttagatcaaaaggaacacctctttctgaaggagcagcacacagcaagacagaagggaaccactaggtacagtaaaatcatttgaacatcatagaaatttacccaagttaccaaattatcagaaacaactgtctgtactgacaagctgcataactgagcattcccccccacacccgccccctgttgctgtcagtgtgcatcatttcctttccttcttttgagatggagtttcattctgtcacccaggccggagtgcagtgacgtgatcttggctcaccacaacctctgcctcccaggttcaagcgattttcctgcctcaatctcccaagtagctgggattacaggcgcccgccaccacacccagctcattttattattattagtggaggtggggtttcaccatgttggccaggctggtctcgaactcctgacctcagatgatccaccctcccacctcggcctccctaagtgcatcattttctttttgattgcaagtttccatctgtctttttttttttttttttttcttttttgagacaagagtcctgctgtgtcaccctggctggagtgcagtggtgcaatctcggctcactgcaacctctgcctcccaggttcaagcaattcttgtgcctcagcctcccaggatgctgggattacaggcgtcggccaccacgcctggcttttgtgtttttagtagagacggggttttgccatgttggccagactggtcttgaacacctgacctcaagtgatctgcctgccttggcctccccaagtgctgggatttacaggtgtgagacaccacgcccggccccatctgtcatcttaacagcaattagtaaagaacactttttctattgtgctttagggaacctccttttgcttggcctaggaataaccttatggaagatcccttacttacatttaaaacaagtcacattcttttctgagagccccaactgttgaatatgtttagtaagaagcgctcttccctgggcagttggttgagcctgcctcttatgctgagctgtaggatgctgccccagtcacgcaacctccagatgaagtgtgtcctctcctcattgtgcaaacaagggccctcacacacaggttctatttgatttttataatcttgctttaggaccagggaaacaaatgtgaaaaactgtcaagaatgatacacatttggggaaaccattttccaaatgagtaactggagtttaactaaagatgatgaaaaagttgtccctgctagtcattacattgagtagtatgacagctacaggattaggggtggccaattaagccaaatcgagttgctacgggttcactaggtcaaatgaaacccagtgggaggtgagcctatgcagcagcctttcccaaatgcacaccaggagacactgactgacctgaaggtctcgggcaaggactctggcccgcagggtctgcagagcaggaatggaagggagactcccggtcaacatgccagccagagaaaaggattttagaaagagagcagcccgtactactgatgtcccaaactacactgtggctaatcttaccatttgctcttaagcatccctaagcagagttctaaaacttctataaatctagactatgaaggcatgtattggtagatgtgagaatgagaggtagaatgaggagaaatctaaaaatattaccacataaaaattcaaatgaatatgcaaaaaagaaaatagctcttggggttttctatttcccaaatttttctaatcttatcacctttataattcaaacatttaaaaaactagataaaaaaattaaaaatggctcattttctgaattctggttttaggattaattacactcatgttttacattcaataaaatgtgtgttttacatatatacatttttaaatcacagcacttccagcttccactccgggatgtaggggtagaaggagcatttcttctactcttacaatgcaaacgagccagatgaactataaattaggacattttttcgaatccattggaaagctgaggttgcagagtaaccaaatggcaccaaatggagaggggcagttgcctgcaaggggagagaagacattagcactagtttcgtagggtcgttgtaaacagacactggaaagaataggctagctaaaagtgatgattggtgaaggcagaatatgggctgcaggagtgttaagacccgggggcctgcagaaactaggggagtcgccctatcttgcaggctttttctttacaatctctaccaggggctcagaaaatactgtaaagagccctaagaagtgtcggctgtgacacacacccaggggagtatacagcggccttgggcatgggtaaaggaacttaccataccctttctctcatctcacagaacaaaagcaccctatgagggaaaaggagcacaaatactgttgccgtctggacactggtgaaaagtcactgcagcagagagaagggactatggaagaaaagccccatcccagaggagggggcagaaatatcactgggcccacaattagctgggaaggggcaagtaaacagagaccctccccaacctagggacacagtgcctaaaactgcaacctaatccaagaacgccagcccctccccagcccccgttacacttcaagaaacagcagagtatttccaggaggaggacagcagagcaacggaagcagagagagagaccctcttggagacccagcacaaagcttctgagcctggaaactcagggtcagaaacacagtgctctggtatccaacaccaatcagaaatacaaggtatcatcacaggaactcgagaccactaaggataatcatagcaaatccaatcttgaaccaagcacaactcctaactactattagattggcataaaagtaattttggttcttgccattaaaaaatgcgaaaaccacaattacttttccaccagccataatatattaattcaacctctgccaacaaaggtcttagcagcaggaaaggcctccttactttcaggtgtaaaaactattcaccaaagtatcttgtcctatgtgagatgtgttgctattaacaaaatatatagagtcatatgaaaagccaagaagaaaacattctgaagatatgaaacattcatcagaaccagagtcagataacagagattttggaaatgagagagaattttaaataattattgttttgagaggccaaggtgggaggattgcctgaggtcatgagttcgagaccagcctggtcaacatggcgaaaccccgtctctactaaaaatacaaaaatcagccaggcgtggtggtgcacacctgtagtcccagctactcaggaggctgaggcaggagaatcgcttgaaccttggaggtggaggttgcagtgagctgagattgcaccactgcactccagcctgggtgacagagcgagactctctcaaaaaaataaaaaaaataaaattatgtttactatgtcaagaaaaatggtggatactatgcaagatcatatgggtgattacagcaaatcgatggaacctataattaaatattaatagaaatgtaagacatgaaaaatgccaaaacagagatgatgaatgccttcagttggctaatcagtaggctctaaactgctgaaaagaaaatcagtacatcttgaagataagttaaaaaaattaccttaactgaaacacaacagaaaaaaatgaagggaaaacaaaatcaacccagaacataatatacaaaagctgtgggacagtatctgtgtaaaatatgcacaactagaatcctagaaggagaagagaaagataatgggcagaagaaatattcgaagagataatggcttagagttttccaaaactaatgacagacacaaaaccacagataaaagaaactcagagaacatcaagcaaagctaggtgaggtgggtcacacctgtaaccccagcactttggttggctgaggtgggaggatagcttaaacttaggagttcaagaccagcctgggcaatgcagtgagaccccctctgaaaaaaaaaaattagctggacatggtgtgtggcttgtagtcccagctactcaggaggctgaggtgggaggattgcttgagcccaggagggttgaggctgcagtaagctgtgatcatgccactgctctccagcctgggtgacaaagcaagaccttgtctcaaaaaaaaaaaaaaaaaaaaaaaaaaaggctaggcatggtagctcacacctataatcccagcactttaggaggccgaggcaagcagatcacttgaggccaggagcttgaaaccagcctggaaaacatggagaaaccctatctctactaaaaacacaaaaattagctaagcatggtggtgcacgcctgtaatcccagctactagggaggctgagacacaagaatcgtgtgaaccttggagatggaggttgtagtgagctgagatcgagccactgcactccagcccaggtgacagagtgggactctgtctcaaaagaaaaaaaaaaatcaaggctgggcccagtggctcatgcctgtaatcccagcactttgggaggctgaggcaggtggatcacaaggtcaggagttcaagaccagcctgaccaacctggtgaaaccctgtctctactaaaaatacaaaaattagctgggtgtggtggtgcgcacctgtaatcccagctactcaggagggtgaggcaggagaatcacttgaacccgggaggcagaggttgcagtgagtcgagatcatgccactgcactccagcctgggcaacagagtgaaactctgtctcaaaaaaaaaaaaaagaaagaaaggaaaaagaaaaaaaaaaatcagagcacaccaagcaaggtaaataccaaccacaccacacctaagaaaaagaagtttcctggccaggcacggtggctcacggctataatcccagcactttgggaggctgaggtgggcagatcaccaggtcaggagttcaagaccagcctggctaacatggtgaaaccccatttctactaaaaataaaaaaaaatgagctaggtgtggtggcgcacgcctgtaatcccagctactcaggaggctgaggcagaagaatcatttaaacccaggaggcggaggttgcagtgagctgagatcgcagtattgcactccagcctgggcaacaagagtgaaactctgtctcaaaaaaaaaaaaaaaaaagaaaaaagtttcctcctagttggttacactggtgaattctactaaacagttaaagaataaggccaggcagggtggctcatgcctgtaatcccagcaatttgggaggcgaaggtgggtggatcacatgaggtcaggagtttgagaccagcctggccaacatggtaaaaccttgtctctactaaaaatacaaaaattagctgcgcgtggtggcaggtgcctgtaatcccagctactcggaaggctgagacaggagaatcgcttcaacctgggaggtggaggttccagtgagccgagataaaaaaaaagtaataataaataaataccaccaattctacaccctcttttccagaaaatagaacactcattttatgaggtcagcattactctgacaccaaatcagatgacgacagaaaatttcagaccaggatcgctctgaatatagatggaaaagttctggcaaaatattagcaaaacaaataccattacacacctattagaatggctaaaaaatggctggttagctcagttggttagaagaaaaaccaaaaagaatggctaaaaaacttctggcagtgccaaatatttgtgagatgccactggaactctcatgtgctactgatgggaatgcagaatggtatgtcactgtggaggttgggcagcgtctcagtaaagactctacttaccatatgactcagtgcaatgagtgctgacaccaaccacccggagttaggtcaaactgtacaggttatgggcaaagtcttccacaagactgccctcattccagacacaagctccaagttccgggatcctgaggccaccctcacttctgatcagctgattacaaatttgggcgtatttgctatcctactcatgtttaataattgactagaacaactcacagaactcagaaatgcacttatgatcagagtttcattatgacaaaaggttacaaataaagccagctaaagggagagatacatagggtgaggcctgggagaggcccaaatgtgaaggccccttgacttcaggacaacttactctccaggcacactgatatatatatataaatataaatatatatatatttatatttatatatatttatatatatataaatacatatgtaaatatatatatatatatataaatacagagtactgtcaaccagggaaactcactcaagctttagtgtccagttttgagacggagtttcactctttttgcccaggctggagtgcgatggcacaatcttggttcacggcaacctccacctcccgggttcaagtgattcttctgcctcagtctcccaagtagttgggattacaggcatgcgccaccacgcctggctagttttgtatttttagtaaagatagggtttctccatgttggtcaggctggtctcgaactcccgacctcaggtaatctgccttcctcggcctcccaaagtgctgggattacaggcgtgagccactgtgcccggcaggtgtccagattttttactggaacttccttatgtaggcataacaatcattggcaatgagttgaactgggctatcacatggttcagagctccaactgtctaatgacacccacagcatttctggtgtagccagccccgatcctgagtcatctcattagcatacactagcaaggcccaccataaataactcctaacacttgaggaatgccaaggatttagagggcacttcccaggaactaggacaaaggccagacaaattctctattgcacacccagcaatcctgtccctaggcatatatggtttggctgtgtccccacccaaatctcatcttgaattcccacatatcatgggagggacccagtgggaggtaattgaatcatgggggcaagactttcctgtgctgtttttgtaatactgaataagcctcatgagatctgatggttttataagggggagtttccctgcacaagctctcgtctgccaccacatgagatgtgccttttaccttttgccatgattgtgaggcctccccagccacgtggaactgtaagtccaataaacctctttcttttgtaaaatgcccagtctcgggtatatctttatcagcagcatgaaaacagactaatacagcatgtaacactctagagaataaaagcttacactcacacaaaaatctgtacccaaacgtttacaagagtctaatcaccctaaactagaaataacccaaatgggcaaatgaatgaacagtggtatatccacacagtggactactactgctcagcaataaaaaagaaggaggtgctgattcacacaagatgagtgaaacttaactgcactttgcgaagcgagaggtcaaactgtgatcccgtttacatgactctggaaaagcaaaaactaaaagggcagagaacagatcagatcagatcagatcagcggtagccaggagctgtggggaaggggggtggttacctataaagggccagcacaggggaatcttgggggtgactgaaatgttctgtatagtattgtggtggcggatacaagacatttgttgaaacccacagaactgtatgccagaaagactgaattttaatgtatgtaaatttacaaattaaccaggatatgtgggggaggacagaatgtagaccataacagatgaacctgttacaccaacgaagcacaaaatcacaatgaagggattttgtgaaagaacagaactaatgtaattttgaacctaaatatctttgaaaaaaatgttatgacacaatactgaaaagctaaagactaaaagaactgtatacaagcactgtattttaggtggtaaatctgttttttgtagggcatagcctggaatccacaggaggccaacggttctgaagctacttgtatattagggttgaacaagtacatacatatattgtagctaatgagagctaggcttctgtcagagaaaggcattataaataagagggaaggccagaatgaggcctctggagctgaactgttaccaatatagactcacagtcatagtgacacacacacacagatatgtacagaaatacacataaatgtgtgtatttgcatgagttaactatacagtcagccctctattatctttggtttctgcatccatggagtcaaccaacaatagacagaatttatttttaaaaaataataaaaaaaatagcacaataatttacatagcatttacattgtattaggtattacaggtaatccagagatgatttaaagtatctgggagatcaggcgtggtggctcacacctgtagtcccagctacctgagaggctgaggtgggaggattgcttgagcctaagacttcatagctgcagtgagctatgcacagctgcaccctagcctgggcaacagaatgagaccgtctcaaaacccaaaacaaagtatccaggaggatgtgcacaggttatatgcaaacactataccgttttatataggggacttgagcatctgtggactttggtatccacagggagtcttggaaccaatccctcacagatgctaaggaacagctgtctatatacattttctttctttctttttttttttttttgagacagagtttcgctcttgttgcccaggctggagtgcaaatggcacgatctcggctcactgcaacctccgcctcacgggtttaagcgattctcctgcctcagcctcccgagtagctgggattacaggcatgcgccatcacagccagctaattttgtatttttagtacagatggggtttctccatgttggtcaggttggtctcgaactcccgacctcaggtgatccacctgcctcagcctcccaaagtactgggattacaggcatgagccactgtgcccggccatacattttcttttttttgagacagtgtctcactctgtcacgcaggctgaaatgcagtagcacgattttggctcactgcaacctctacctcccaagctcaagtgatcctcccacctcagcctcccaagtagccg

SEQ ID NO: 1447 - DNA, 6545 bp, Homo sapiens
tgctgatcgctcgtgccggtgcggccgttaaccgcccttgccggagccctaggctcaaaagcagccccttacccttcctgggcttcccccaacccctttcccggtctgccctggggcatgagcagcgatggccggctgcatccctgaggagaaaacttaccggcgcttcctggagctattcctgggcgagtttcgcggaccgtgcggcggcggcgagccggagccggaacccgaacccgaacccgaacccgaacccgaacccgagtccgagcccgagcccgaacctgaactggtagaagctgaggcggccgaggcttcggtagaggaacccggggaggaggcggccacggtagccgcgacggaggagggggaccaggagcaagacccggagcccgaggaggaggcggcggttgagggtgaggaggaggaggagggcgcggcgacggcggcggcagccccggggcactcggccgtgccgccgccgccgccccagctgccgcctttgcccccgctcccgcgaccgctgtcagagcgcatcacccgcgaggaggtggagggcgaaagcctggacctgtgcctgcagcagctctacaaatataattgcccttcctttttggctgctgctttagccagagccacatcagatgaagtccttcagagtgatctttctgcacattatatcccaaaggaaacggatggcacagaagggactgtggagattgagacagtgaaattggcccgttctgtcttcagcaaactacacgagatttgctgcagctgggtgaaagacttccccctccgcaggagaccccagctttattatgagacatcaatccatgccatcaaaaacatgcgcaggaaaatggaggacaaacatgtctgcattcctgactttaatatgctcttcaacctagaggaccaggaagaacaagcttactttgcagtgtttgatggccatgggggagtagatgctgctatttatgcctccattcacctccacgttaacttagtccgccaggagatgttcccccatgatcctgctgaggccctgtgcagggccttccgggtcactgatgagcggtttgtgcagaaagcagccagggagagcttaagatgtgggaccacaggagtggtgactttcatcagaggcaacatgctacatgtggcctgggtgggtgattcccaggttatgcttgtgagaaagggccaagctgttgaactaatgaagccacacaaaccagacagagaggatgaaaagcagagaattgaggcccttggaggttgcgtagtctggtttggtgcctggagggtgaatggaagtctgtcggtttccagagctattggagatgctgaacataagccatatatctgtggggatgcagattctgcctccactgttctggatgggaccgaagactacctcattctggcctgtgatggcttctatgacaccgtgaaccctgatgaggcagtgaaagttgtgtccgaccacctgaaagagaataatggagacagcagcatggttgcccacaaattagtggcatcagctcgtgatgctgggtcaagtgataacatcacggttattgtggtattcctgagggacatgaacaaagctgtaaatgttagtgaggaatcagattggacagagaactcttttcaaggagggcaagaagatggtggggatgataaggagaatcatggagagtgcaaacgcccttggcctcagcaccagtgctcagcaccagccgacctaggctatgatgggcgtgtggattcattcactgatagaactagcctgagcccagggtcccaaatcaacgtgctggaagacccaggctacctagatctcacacaaatagaagcaagcaaacctcacagtgcccagtttttgctaccagttgagatgtttggtcctggtgcaccaaagaaagcaaatcttattaatgagttaatgatggagaaaaaatcagttcagtcatcattgcctgaatggagtggtgctggagagtttcccactgctttcaatttgggttcaacaggggagcagatatacagaatgcagagcttgtctcctgtctgttcagggttggaaaatgaacagttcaaatccccgggaaacagagtttctagattgtctcatttacgccaccactactcaaagaagtggcacagattcaggtttaatccaaagttttattcatttctctctgctcaagagccttcccacaaaataggcactagcctgtcctcacttactggaagtgggaagagaaataggataagaagttctctgccatggaggcaaaatagttggaaagggtacagtgaaaacatgaggaagctcagaaagactcatgatattccatgcccagatcttccttggagctataaaatagaataatttttctttcaagtaggttagctagctctcccccaataaaaataccactatcagagtagaaacaaggtagacatttctaaaacatatgtgcttcattatgaatccatggatggctcaattcttaaatgtaaatagatctctaggaaactcaaagtacagtgttttcaatctaaaaagaagtattggcagtttcacttgcaaaattacacagctggtccctgtgatgtgtctcgacaccaatacacaacccccttcccaccatccttcatgtcactagatacacaacccccttcccaccatcccttcagtcactagtggaagctttcaagttagttatttcagtcaggatatacagtgttgaaatctcaatgcagttgaaatctggtctgatgtgcctaatttatctgtggaaaatttaatgctgaattacatttggttgggaaatgtccctcaaaatcctgggcactatgaaggaaccccctgccccctcacctttttgggtaggtaaaagactaaaagccatatggattttaactgataacaatgaaagtggtaaatcagtgtaaaagtgtcatattctcagacttgtgaggcggtttatagtcagaaagatttacggatttttttcctgtaacataaaagattgtgaactttttttaattaaaaaatatttcctagggctgtagttatttgggagtttcataacctgttatggtgcttttggtggaatttttattatttagcattttaggagaccgctgtcaactggttttaatctatgatgctaatgtgttttccactgtaccctcatctcaggaataaaactgctttaacggagatgatgtcaggtacaaatacactatagagtcaaaataccatttacaaagaaaatcaaaagcatttctatattttgtctttttttagttcagacagcaaaggcatgtactactataaaatacaaagtgattttagagaatgaaaaatgctacttttatcttctctaaaattatttcccccaaggtagtgaagtaattggaatgaaggaggctgaaagtattgtctaaagtgagcccagaggccactgagaatgcagattactgacagccaggtctgtttagttgtaattggaagacacatgagtgtcctgcttacatgtagcttcagactgcagagacaggacgtgtgcttttcatttcaatatttagttatatttgatattttgaaactgtctgctttttgctatttctgcagtttcaagttagttagaagcatgttgtcaactaaagacaacaaactatcagattcattcattcagtgaagcagcctctgattctctaagagtcacgaatgtcttagtgttaccctcccctagtcaacagcagaccagcctggccaatgcctatgggtggcccctctggagtgctcactaacaagggtgagtgctctcgctaagaagtgtcccccgcctaatcatgtgtttataggatagtacacgttccccaggcccataacagaggactaaaatctctgaattttaaagacacagatgactggcatattttggataccagtatagctatatcaaatagacaaaaacagcttcactttagcaatgatcagattgttaatctacagattttattttttaaaatttggatgtaagtagagactttcagtatttgttttctcttgattttgaagtcatttcttcttctcacgtctgtgacaaatggttgaaaaggagtcaacatggccccaactatagtgccggaaccttttcatcattctgaggctttgccccacacatggtcctcactcatatctgtcaccttctgaagcctagatcttgttaacccatcaggtgcagtgtcagtttcaaatcaaattatctaagaaaacaagaaaacaaaggcagcagactattggtacacattatagtccaaagtgcttagcgaagtaaaaaaaaaagctttttaaaatttctattgttgtctattggtaatgtttttgatcagaataaagagggtaaagggaaaaagttactacacatgctaggctttctcagtggggaaaaaaatggctggatagaactgggacaaacacagacccatctttaggggtctggattttgtaggtccgactacacagcagtgttaactcatttctcatgccattagctctctacaaaataaagcaaagtagttctagtgtggtcgttataaaccaatattgtgaaaaatagcaactattcatttgttcacaacatgcgtatttatagagtagttaggtaccatttgtaaggtaaatcctttaaaattctataatacatactaaaatagtggttattggtctgatatatgctgctcttggttctataaactagataaaagcagtgctttgtgaaatgcagtgttctctcttaacgccactggtgataggaagtagttcccttcagttcaaatcctgtgcccttatttgctgcttgctgacgtaagcaataagtaaccctctaactaatggtatctacatatttctgtaacttgtatttaatgatggtgtacctggtgattgtaaaaatattagacagatataaaagtatctatataatatctataaactgttaatgctgaggtatagtctgtgaattatgtgttttgtatttttattcattgtgtaatttagtggtggtgaaagttctacactcaatccttaaagagtggcagtatccctttttcaatttaacatggtctgcatcaatctgtttgcctgctaaacaagttagaataggaaatagtaaaataaatccaaacaagagtgtaatattggttagggaaacaaacttcaggtcaccaactgaagtcattacaaactccttgtacattcactgtgagtttcaaagggagtcagtccctaatttacaggtttcctttgttcactttctagatgtgtacttttgagggacatgaggttaggcaacattacagcaacacacactggggctattaatcccatttaggtctgtactaaagaggatgggtagaaacacatatgtatataccttttctttacctagaagtgccatccattgtccttgaattattatgattaaagttactgttgcatttaggaggctccttgaaagtaacaccttttccaaggacaatggcaacaatgtcaatgtcaacactgagtctaattttgaccacatttatagtggtatagtgtcaatactgcattttcatgacaaccacactccactgttgaaacactgtgccagtgagaagtgcaacatccagtgggcagatgaaaatgatgcatggccaagttcagtgtttacagataaaactgctgtggttcaagtgcttccttccccatcaaatccttgataaggctttgtgggaaaatgatctaaattattgttttaatttttaaacctaatttattcactcagtgaacattcttacctaagcaaggctataaaagggaatactacagttttgtccacactttaatttgagaccatttttctttgaatcgtaagttagcaaaagaaatttttttcacctttgaaaatcacgtgatgtgaaaggacaaatgcccactcttctattctgatctgcaaatagcttaaatgtctcttgcaaaacaaagtaagataccaccagtattacaacacaatgattttccagacaaatggtatggtgttgaaaaataactgttacttcttaaagcagcattttatcttctattttgaagactatttattgtaataattagaaaacatgaaatagggaactccagactgacacagcagttgtttttgaaaaggaaataaactttgatgaattagataatccagatacatcattgtaaactcttactctaggtgctctttggtgagagacaggctttgttctcttgttcataacatttctctgcaaagaattctctatggagtgaagcgaatgaagtgaataatttcttaccaaataaatttatcaatttacaaatctgctctacatctcacttttgagttcagttgtagtcatgagtgatccttcatattttattaaaagtgttcattcaggtaaggtgtatgttgaaattttgccaattatcttaataaaacctggcaatttaaaaa

SEQ ID NO: 1448 - protein, 751 aa, Homo sapiens
MAGCIPEEKYRFLELFLGEFRGPCGGGEPEPEPEPEPEPEPEPESEPEPEPELVEAEAAEASVEEPGEEAATVAATEEGDQEQDPEPEEEAAVEGEEEEEGAATAAAAPGHSAVPPPPPQLPPLPPLPRPLSITREEVEGESLDLCLQQLYKYNCPSFLAAARATSDEVLQSDLSAHYIPKETDGTEGTVEIETVKLARSVFSKLHEICCSWVKDFPLRRRPQLYYETSIHAIKNMRRKMEDKHVCIPDFNMLFNLEDQEEQAYFAVFDGHGGVDAAIYASIHLHVNLVRQEMFPHDPAEALCRAFRVTDERFVQKAARESLRCGTTGVVTFIRGNMLHVAWVGDSQVMLVRKGQAVELMKPHKPDREDEKQRIEALGGCVVWFGAWRVNGSLSVSRAIGDAEHKPYICGDADSASTVLDGTEDYLILACDGFYDTVNPDEAVKVVSDHLKENNGDSSMVAHKLVASARDAGSSDNITVIVVFLRDMNKAVNVSEESDWTENSFQGGQEDGGDDKENHGECKRPWPQHQCSAPADLGYDGRVDSFTDRTSLSPGSQINVLEDPGYLDLTQIEASKPHSAQFLLPVEMFGPGAPKKANLINELMMEKKSVQSSLPEWSGAGEFPTAFNLGSTGEQIYRMQSLSPVCSGLENEQFKSPGNRVSRLSHLRHHYSKKWHRFRFNPKFYSFLSAQEPSHKIGTSLSSLTGSGKRNRIRSSLPWRQNSWKGYSENMRKLRKTHDIPCPDLPWSYKIE

SEQ ID NO: 1449 - DNA, 51718 bp, Mus musculus
  misc_feature (1)...(51718): n = A,T,C or G
tgcatagccctggatgtcccagaattcactacctagaccaggctagcctcaaacttacagagatcagcctaactctctacctcctgagtgctgggactaaaggcctggtccactatggccagcttacaagatatttctgaatgaaacactatactctattctaaaaggactaaatggagagatgtagactcgggatcagttaagcttgagaattctccccatcattctcaattaccattccccccacatttttatcaattgattcgaggaatacacagtaatgatctcaatggacacttcagagtgagactgagtctaagcctcatacagaacagcgtagggccaagaaagcagtagaccattctgaagaagaaagtgggcctgtcccaaagagataccaagactttctttgaaagtgattgtaattaaaacaatgcggtcttggtgccgggcaggacaaagagatcaatagaacagagtggccagaaacggagccaagtgtatgtggggatttgatttatgatgggggggggcccacagcactcagggagagagaaccgtctattcaataaagagttgttgggacaatcggcttttcacatgcaacctctatacgccatccataaatattaattccagatggattagagatctaaaagtgaaaaacagaactttaaaataattaggaggaaatgcaggcaagctgagagcagacaaacagttctgacgtaaggaacacgagtcagaaaagatagatttttattatattactgacacccactcccaaagccctctattataaaaatggcactctgaaccaagagaagagacaagtaacagcctgggtggcaatgctggggacacatcaaacagataaaggttagtattcagaatatggaaggacctccgggaaatcagccctctggatgctgaggcccaaggatcaggaattctaagccagccttggctatacagtgaggctccatctccaaagggatgtagctcagtggtagaagacttacctagcatgtgccaagtcaatccccaacactaaaattaattttcaaagaacagacccagggccaggcatggtggtgcacacctttaatctcagagctcagaaggcagccataactgttctctgagtttggggccagcctggtctacatagtgagttcgaggttagttagaaatgcacacacagtaaaactccgtctgaaggagaaggaggaggaggaggaggaggaggagaaggagaggaagaggaagaggaagaggaagaggaagaagaagaagaagaagaagaagaagtaggaagaagaagaagaagaagaagaagaagaagaagaagaagaagaagaagaagaagaagaagaagaagaagaagaagaagaagagcctagcatggtggcgcacacctttaatcccagcactcgggaggcagaggcaagcaaatttctgagttcaaggccagcctgagctatacagagaaaccctgtctcgaacaacaacaaagagagagagagagagagagagagagagagagagagagagagagagagaaaaaagaaaggcgggcagacatcttgagtacattctaaatggcatcatttctctggctccatcatagttttatgatgaaacactggactgagtcaggctgtcaggcttttgagaaagatgacccttccctatctccgcccatgaactatgattgggcgaaacataccaatgatttttgttcctctgtccaatgattggtttaggcatggatatgtatagaatgttgtcaccaagccaaaaaaaaagaagaagaagaagaagaagaagaagaagaagaagaagaagaagaagaagaagaagaagaagaagaagaagaagaagaagaaaagaagaaaagaagaagaagaagaagaagaagaagaagaagaagaagaagaagaagaagaagaagaagaagaagaagatgatgatgatgattatctgattgggggagggagggagggaggtgggaggcagtagatctgggagggactcaaggatgaaaagcatctactagtttcttttatttcttctctgggcatctccccattggtgcctgggcaaaacacccagagctgaggcagcagtcttggacccgggtgagggttgtggtggggtgttagcaaatgggtgacatttaccctcatggaacatggaaaggaacatggaaaagaaaaatggtggctctgcatcccagtgcctcagctgagtctctggattaaccaactctagggtttctttcttcccttcttcctgcctctaagcaactataggatagctgaggataccaatggaagtgatttacccagagcggacccaagtggacaatgagcccagtatacattctttacctcagtcagggcatgcacactgaagtgtgtactgcttcacatccaacagactggcaaaaataagaaatcccaggtaggaatatcgctctgtggtaaagcacctatctaagcattcgtaagaccctggctttgatgtccaacattgcaaaagacaagtaaaaagccccaacaggagaggcgggttcagtcaataaagtgtttcccttgcaagcgtgaagacccagagccacgtttacacgtaaatgtttgggtggcctatgcttgtaatccagactagggaagtggagacttcctgggggttcactgaccagttagtctatagcctaaccgatgagcttcgggccaatgagaggtcccatcgaaaagaagtggacagctgtgcaggggataacactgagttgtcctctgggctctgcatgagtgcacacacccattgtgcactcacacatacatccaaataaaagaaaggctaggagctgggcatagcaagccaccctttaatcctagcctaggaggaaagtgcaggcagagctcggaggttttgaccaacctagtctagatagtgagttccaggtgagccagggcaagaccatgaaaccttgcctcaaaaaaggggtggggggagatagcaaatgttggccagatgtggtcttggccagatgtggtcttgtacagttgctgctggtaggaggaaggatggagactcagcagctgtagagaacatcttggcagttacagccaagttcaaagttcagtcacccagtacctgaactactgcttctaggtagacatcctgaatgggttcagataaaatcccaggatgttctctgtacccctgcctagagcagcaaaaacaaaaacaaacaaacaccccagatgcaactcaaacactgtcaataggtgaactggcaacaactacatcgtccttcattcagatgataaatataaattaaaatgagcaaaccacatagggattgtgatggtttgtatatgctcagcccagggactagaaggtgtggccctgttggagtaagtgggtgggtgtgtaactgtgggtgtgggttatcagactcttattctagctgcctggaagtcatttttccactagcagtcttcagatgaagatgtagaactctcaacaacgcctgcaccatgcctgcctggatgctgccatgctcccaccttgatggactgaacctctgaacctgtaagtcagccccaattaaatattgtccttatttataatgctgccttggccatggtatctgttcacagcagtaaaaccttgactaagacaggggcccactgtcaaaaatcttgagtgcggaaggtacaaatggcatatatagtattgatattgttacataggctgtaaagactcagaaaagcacgactgtttcatggacatgtaaatgtgtgtgttaaaattgtgggctgatacttgccatagtttatgtaaacccaagcagaacaagccagccacaaaaggacagattctgtatgatgcttacataaggtacctagaggagtcaagttcacacagatacaagtggttgccaggggcagcagtgggaggggccagggagttactgtgctaggcaatagtttccactgggaagatgggaaacacctttgcagtttgatttgagctctctctctctctctctctctctctctctctctctctctctccctcctccccctctccccctctcctctctcctctctctctcagacagggtctctcactggccaggagttaggcaagtaggctaagccagctggcctctaagccccaagccactgtctctgcctccccagggctcggatcacaagcctgagccaccaaccactcaggttggttttctcttggattctggggatgcaacgtaggctttcacgcttgcacagcaagaactgtactgatcaagtcatgtctccagcctcccagattaatataatttctatggacaaacctgaagcaaacaggcatttgtaaattctgctgtgatgcagttctctgaattttccttattttctaggaaaattttcaaactaaatgtaaaagaaaaggtaaaaaaaaaaatttttttttaaacaaaaaagagttcggggaaacagaattgcctcaaaatcacaagactgcttatgttccactttccccaaccccttcccaaggctacttgaagagcaagggagccgagcaagaagagctgaaggctctggagactgaacccgtgccaggtcccaggggacccagcagagcctgctgctggagccagtcaggctggagatggcgggcaaaggactatgggagaaagtgattttgaaagttgtctcttccttgcacccagtccagaaagcagatgaaaaaccagcatccaaaaaaaaaaaaaaaaaaacccaaaacaaacaaaaccacagcaatgtgccgggtgtagtggcgcacgactttaatcccatcactcgggaggcagaggcaggcagatttctgagttcaaggccagcctggtctacaaagtgagctccaggacagccagggctatacagagaaaccctgtctcgaaaaacaaaaacaaaaacaccaaaacacagcaatgtgagttcttagcagttggagctccttggatttgctgatggcaaaatgcattgcctaatctttcccgttccttcttttttcccctttgacctctctgcatgtctgtagagcccccatggctacaacacatctacaggctaagtcagctaaagatgggctttcctctaaaacacccgaggacttggagatatctttgctgtgtcccaccccatcccccaacctatacacacacacacacacacacacacacacacacacacacacacacacagactgaggcttccctagtctccaagaagcatgtgatctttacaaggttacacaggtgctagagtacagtgtgagactgatgggaagaaagccagtagccagaaaagttaaaacaggtggtagctatctcccagctgtgggaagaaggggcccacagttcctctctctgcaggtgcagtgacagacttcaggaataaaagaccctttgggaagtttagatgaaaggtcaccttcaaaaattatcttagggcaggggtgtagttaagagatgtagtgttttcctagcatgctggaggccctgggttcagtctctaccagggcaacgagaaaggattcaggcagatttggaggagccatgggcgggaatgcttatagagcagaatttcacataatggaccttaaaaagaagcagaggcccagtgtctcactaaaagagattcaagagctgtagacaccagagctcattcccagccacgtacctgcccacactgtgcatgcgcaccccgatacatgctccaatacacgtgcattcattggcaggggcagcccacactaagctccaacctctgcgctttctgcattcaggatctctctagtgccctgggcagctccttgaggttgatctattgtctcccagcttacaaatgaagagatctggtgaagtcctttagcttggaagtggcagcttgaggggggaggggggggtctgttcaaacaaaaatggcctgatttcaaagccccgttccagcctgtgcctcacaggaagtaggagacacccagggtcatccatggtcagaagatttcagacattcaggttgaacgtgttaggaactgaggaatccaaaataactagcccaaggtcatggagcaaatgggaggagctaggactcaattcagacctgcagaaccctagctgggacttgtgtgagccggtgttgctcactccttcctgttcccagggactctaactcctcaccaccaccccaccccggcaccaccacgctgggtgctgggtgagctctcctatttggaaatgtgggtacacaagcatagcttcaccgtggatcccagaactagctcaaggccctaggcaacaaaggggaagaactggggtgaacattattgaggagccatagaacagccagagggcaggatctagatcagagtcttcacagtggccaggaaacaaacaaacaaacaaacaaaaactgctttcagaagttctctcaaaggcccagggctgggaagagcagtcagccttggcacccagcccatgcctgagcccagggtgctgaaggctgggacttatcgcacatcagactctctccacccatcttcatcagcatctttgctgttacacctgccatttaaagcaggcaagcctccaggcatgtcatcaaagagcgccttctgagaggggccatcctgagaaacaagggcgttcaggccgggagagggcggataatcattgcctgttgcagtttctatttcttagccattgcccgggagacttctccttcctctacacagggtcatacgtttctgggctgctggcacctctcgcaggcctcagtttatcccctggaagcactgaggagatacacgacttctgccaggtcacccagataataagtggtatagccaagatcctggcccgactttggggaccactcccctctcctctctatacgggacaaaggaatggcagaaagttccatcccaagaccaccaggtacattggcgatggcatcaacagatttcctctacctgggcccccggggaaaccagaaggttcaaattatcctgagatgctaaacagtcaagaatcagtgaacttacagcccgaggaatgaaagtttacctcagacaggcagggacaggatggaggtgacaccccgtgccccacccatctcttaggcagattgggtcgtgcctgattccaaggaaagagtgatggttaaagcggttaccactcagctcccttaaacgcttcttcagaagttccggcttgggtgctgctcagctccatctaggagcccaggaaaaaataatctccactcattagcggcagccacccaagctccacactcaccgtactttctcacatcccaaagcccttaaaggagttttactctgagaaatcactgaacaagggagacctgagggtacctttaaatccagtccatcctaaatttctgccaagggtgttgggaaagggactaacagctggttcccaacccctcctcccacctggccaggagtgtgggtacagaccccttgggctggggccagtgaaaaatgactcaccacaaagggtgtgggagattctgggcagaacacccagggccctgggccctccaccaagtccacagaggaactctaagaacactgctcagattcccaactggcaatggggtgagcagaagggcatcgcccaaccactgcagagggagctggggatgtaaaacagttgctaaaatgcttgctgagcaagaaggaagccctcggttggagtaactgctcaagcctgtaattccagcactcaggaggtggcggcagttggatcagaaaagttcaaggtcatccttgactaagtatttagttcgaagccagcacaggatactgcaggccctttctcaaaaaacaagccaccgactgccgtagccgggttagggtgaagggctcaagccccagacttgaatttgagaacatgtcctaaagcttgttcatgaaagatgggtcaggaggggagacggaacctggatggcttctttaccctgcacagatccccaaacgcagaactggggaggggtaagtctcctgcccactgtgcaaaaatgcagggggcatccgaaagcctgagatttgggttcatctccggctccagatgagagccaaaaaatcttccctctcctggcacactactctagggagccagtccagtggttcttggctcctccccatcccaatcttcagggttcccaggcggtttccccacgtcccatcccccccatgcacagagctctttcgcacgtgccatgggttagtgtcccacaaaacccacacacggagaacggaagggtagagggttccctctatgagctgggccaggccaaccggagagagtgagaaaacgggaagaggaggaagaggatggaggggaagagggcgggggaggaggcagaggccgcaggaaggcctgagatgcaggaagcagctggggagaggggggaggctttgtgcctgagttgttttctgggtcctagtgtccaccctgttcagttcctgggaatctaccaacgactggaggagctacacatctagacctgactgaatattggacggatcctcactgctagattggggaaggataacgggcataacaaggccccttgttgtgtatgtgaggaatgaaggagctctaaagaagctgagttttcaaggtgggatttgtagggtacacacacacacaaacacgcttgcacacaagtgaccagaatcctctaagtctgagacccaacgtagaactctcaatagggaaactttagccctgggactctagaatcattccttccaacctcccccaacaccttacaaaccttcctgtttcagagatcttttctggcaggttatgaaggccaggattctatacctctccccaaaggggtaggtgaacaacgtcattttaagacttcccaaggcaaaaaagcatctttggtaatctcctgccatatgggtgatgtaacccccaaccctgtccctttcttcatttctcctccggacagagcaccacaaagattgctgggcccaagttttacattctgaaagatgaaaaaaaaaaaattcctatggggaattgttaaaatgaagaatcccaggttccgcctctgagattccccttcacctttgggaaggagctagaaattatgtactttgatctagcacccaaaagttttgttgctggtacccctgaacactctaaggacctttagagaaatgattaagggccctccccacagaaccccttcactttgtgggaggagaaggccagttcctgctgtggctggatggctccccgcccccagggttaaatgaggggacgcctaagtggattgtgaaaagccgagtttgggatgggagggctgaagaagaatagccaaggtcggtgaagctgcggaaggctgtccgccaactatgagtaggagagaccaggcgacagggtggaagggaaggggagggctcacaggctccggccccggaaatccgatccctttaggacccagtggtaccagtcccccagcggcggcggcgagaagggcagccgctcggtctccggcagccgcggttcgggcagagctagagaaagaccgaggctcggggcgcgggggggagggagggagggagggaggcgcggcggagcggcccgggtcagcggagcagccacgggcgcggggatgccgggcaccccgagagccaaggcccccggccggagtagggggcgcctgcgccgccagcgccgctgacaccgcctcggaggatgtgagccggtgccgtggccgctgcttcgcgggctgggcgcgcggtcccagcagctccagccagcctccgcttcttcaatttgggtgggggcgaccgcaccaggccgctagagctttcgaagggggctggctgtctttggcagcttggttgggggaggcgacccacacagggcgctcggagannnnnnnnnnnnnnnnnnnntggtttctgggggactctatagaaggcctttcgggatttctttctttggggggagggggcggtggtcccgacttggccagccgcctgctggaggggggcagcggggagcagggggatgcgaacccggctcccccaaccatgatgaagacggagcctcgggggcccgggggtcccctccggagcgcctccccgcaccgcagcgcctacgaagcgggcatccaggcactaaagcctcccgatgcacccgggcccgacgaggcacccaaggcggcccaccataagaaatatggctccaacgtccaccgcatcaaaagtatgttcctgcagatgggcaccaccgcggggccgccgggtgaggcaggcggaggcgcaggcatggccgaggccccacgggcgtccgatcgcggggtgcgcctgtccctgccgcgggccagcagcctgaacgagaacgtagaccacagtgccctgctcaagctgggcaccagtgtgtcggagcgcgtgagccgcttcgactccaagcccgcgccctcggcgcagcccgctcctccgccgcacccgccgtcccggctgcaggagacgcggaagctgttcgaacggagcgtccccgcggcctcgggtggcgacaaggaggccgtggcgcggcggctgctgaggcaggagcgcgccggcctgcaggaccggaagctggacgtcgtggtgcgctttaacggcagcaccgaggcgctggacaagctggatgctgacgccgtgtcgccgacggtcagccagctcagtgcggtcttcgagaaagccgactcgaggaccggccttcaccgtgcacccggcccccctcgggcagccggggcgccccaggtcaactcgaagctggtcactaagcggtcccgggtgttccagccaccgccgccgcctcccgccccgtcgggggatggcgcgaccgagaaggagcgtggccccggagggcagcagcccccacagcaccgggtggcccctgcccgacctccgcctaagccgcgggaggtgcgcaagatcaagccggtggaggttgaagaaagtggggagtctgaggccgagtcggctcccggggaagtgatccaggccgaggtgacggtccatgcagccttggagaatggcagcaccccggccaccacagccagccctgcacccgaggaacccaaggccgaagcggtccccgaggaggaggcggcggcgtcagtggcgacgctagagaggggggtggacaatggccgggccccggacatggcacctgaggaggtggatgaatccaagaaggaggacttctcggaagcggacttggtggatgtgagcgcctacagtggactcggggaggactctgggggcagtgccctggaggaggacgatgaagaagacgaagaggacggggagcccccctatgagccggagtcagggtgtgtggagattcccgggctctcagaggaagaggacccggccccgagccggaagatccatttcagcaccgcaccgatccaagtgagtgaccccccttgggccccccgagctgcccttgccacgtgcgtgtggtcgctcccgcccagacatccgtgtttggcaggctgagtcagcccctgccacccagccgggttcccagaagttcccacaatgagggaggcgtgggggaacttccagctgtttgtcagagtgggaaggttttcaggtctgtgattgtgaaggtagcctgctgcgacctgccctcaggttcctaaccccgcccagcatccctccctactccacgcctactctgggacacctgctctctcttcctcccccagacattctttcttccagaagctgccagaggctgggacttggctgccctgaaggggtgtgggacatgtcctggggatactgttcctacacatgtgctgtcaggaagagaaaggtggggagcttagggacgcttcctgcttctggatgtgtgaggcttggctctgtctggggtgacagaggggagctaggaacttccccaaacaaagatacagtggaaggctgaccctcttccctgctagtactcccactcccactttgcagaagtgaaagaaggaagcagtcttctagggtgagctggaccaaggccatgtgactggggctgggagaaagaaccctactccttaagtctgtgctgggccagcttcccatatccagggttgcatccaggaaaggggcatcttatatggtccctgaaggagcaggccctacaggaagaggggggtgagtttggaagttcccctaaggtgcctgggcaggcttttcatgcctatagccttccatattctctatggactttaaaagaggctgggggcttgcttgttcagcccctctccccctttctctagcaccactattgaagattggtttgtgaactgtgccagccagtgctttgagatcctctgagtagtggtggtagagaaaagatgtcccctggggagaattaagctcaggagaccactcccattcccccctgccctgtgagcccagctggcacgtccagcttggatggtcttttcttccctacccaagctctatggagcctagcacctggcctgtccctgggggagcatacagcaccaaggactttcgttggcctcgaccctgctccttcctccttgccctctgaagccaaaccccattgtgtttgttactcctggacaccaaagctgcccaagtttctctcactctccacctcctcctttccccccaggccagtagaggtccaggaggttaagggtggccagcctttcttccctccctgctctggggtttggaagactcttccatgccctgttccccttgaaggcagtgggatccaggaaggagtggaggctggtgggagggtgtcagaggcagttgtccaatccccatggggtttgtgagcagccccatgccctcatggagagagaatgtggtctgggcctctgtctatatctgacgccttaccctgatttttttggtaaaaaatagcacatgatttggagcagtgctccggactccctggtgactctggagcaagccggccactagcgtgaaagccagagcagtgcagatgccccacgtgtctgacttttggccttactggggcttttagcctcctcagcctggctagggccccaggctttttctcctttgccacctccacactaattctgaagccagggttctccgcccctccctgacccagttgtcaccgttatggaggtcggggtatctgctcagggcagaggatatgattccaaactgtcagccgaggagatagctgaacccagggccttctgataggaggtgtggtttctggtggtccctggcctctgagcctgaggcctgcctgggattcccacggggggcaggatgcaaaaggtgatcaggttgtggacagaagccaaggcccagatcagttccccagagtgttttgggagacagcgtggagtgtgtgatggggtgtggagatgggttgggtgatgggaaggggctaggggcaacactgtctctgggcacaggggaaaggccagaggcctcaggtaaagagatgggacaaggccagtttgctgacccaggctgaggccattctttgtcctaaagcttggaacacctttgaagtagggaactaagtcactagtgacccgcctaccacagcccatctagaatctgatgctgccccgctactggatgagcaacccctgtgaccttgggtaatggattatatgtggaatagagtctgttgcttcaaggctgggaccgctggccagatgttggggaccgctgtccagatgttggggagcaatctgctgacccgtgcacagtagctggacgagcatgaaagtgtctgatacagtagagtcgagggcattaactaggtgagcccataaaccccagctgtgctgatggctggtcctagaagtgtcctctctgcctcccaccatgacagtgtgcctctgtgatgagactggagatttgaatggcattcagtaagccccaacaaaggggtaaccctgcctgcagggtgcccatgagcatgctcctagagcagaggaggccctggcacaggtcttgctggagacagtgtcttcctttaacccttctggtccatacagctgataagagctgcctctaccactcctgccccaacttgactttaagcgatgccaacttagctaccagtaaagccacaaaaaaaaaaccaacaaaaaaacaaaaaccaccgtggttcctcttcatgaacaccaggtacctacaaagcccgtctccttttctctgatcctatgaaaaggtctgagttagacacctagaaggagagagacagcagaggggcacagggactgccgtgcaggggcagacagattcccacctcacatgatctgtggtccctttagagccccagtcttggggcctatgcctggctcttccggtacctgtggacagggttattgttcttcagggacacagttctggcttgtgggagggccataggggctccactttctcccctactcttgctctctggggcctacctggaatttcacagccttcccttctccagggaagtaggaacttctctgcttcctccccacccctctgtgacgtccatttcagcatctgggtagggaagggtcctggtgcctctttcctcctttcctccttctcccctccccttccccatctggcatcctccagtgtcttcgccatctttcctcccctcctcctcttcctgtcttctgctcagcccgttcctcctctgtgtctgtgtccaccctcagctgtctggctcttaggtcttgtctcttcctttctctctgccctggtattggagattcccagaccttgcagcctccctgggagcgtccatctggtcccccccagactataccatgtggaatggatttcttgctctcttgttcctggggctctagaactaggaagcccttttgctgggaggtggattccttgtgagatcagtggaagggaagggcctctgggtggacggacggacagacggatggacacggggcttcatgcgactcagctggcccaagggccttctcctgccaatgtgctcttgccctcctacgggcctctgagaactgctcctccccaggtattcagcacctactccaacgaggactatgaccgacgcaatgaggatgtggatcccatggcagcctctgcggaatatgagctagagaagcgagtggagaggttggagctgtttcctgtggagctggagaagggtgagagaccaggccaatctaaggcacacactggggtctcccgtgatgctagcctcggccccgccacccctgtgggtacccgcatgctaggcttcttgactctatctgcctttcttggcatcccttgtccgcatcaatagccaccagtgtctgcagtgtattgccaagggatggtacgtggtggacacatctcctaagtactgtgtaggtgatcctgggctctgttggaggcacagagacaggtaaaagcaggctcccagggagatgactcctctaacttcttacttcagtgctgggaggaaagagaggccacgtttgatagagcctcaccaagggagtacgctctacagtgagcccttcagagctgagctttaaagaggaaccgtttggaaagtggggttgaacacagaggtaccctcagcacaggatgaatgcatggccagggtggcatggaccatggtgagagcacggtcatttctgagagggattgggagctattgtagggacggggaaagctcttctagaaattcagcgtccaggcagtggtggtacacatgcctttgggaggcagaggcaggcgtatctcttgaggtctaggtcaaactgttctacagagcaagtttcaggacagccagggctacacagaaaaaccttgtcttgggggtggggagagaaagaaaaagaaaaaaaaggaaggggaaaaaaagaaagatcaccgaggcatgggtacagagaggagtcatagtggatgatggcctccaatggtggggtcagcagtcgcttagtggaagtggatgcacggggcaggatcaatcaacaagtgcttggtggccactcgacctagcagagcccggaactgggagagaggaatctggatgcttcccaggcctggcatctcatgggtaaaggtgcccgtcctcagggagcgttggtaaggaaggtcatatgtttggatgccagaggtccataggtcaggcagggcaggtgtagctaggcagtgggtatccacgtttggtcagtgacgctctgggctcagaagagaataataggagatcaaaggctcagggctaagacctggctcagtccccatcccagccacacacccttatctgtatgcacaatagcctaccacaccccagccacccctcacacaccctgctgcctgtcagctcgttggatagggcaaagggcaggaagtaacccgtatgagttagcctggcaaaagggaggtgggaggaaccataattctttcccatcatggggtgactcgtaagcttgggtagaagatccctgccagtcatggcttaccccccttctgcctcacagactctgagggcttgggcatcagcatcattggcatgggcgccggagccgacatgggcctggagaagctgggcatcttcgtcaagactgtgactgagggtggtgcagcccatcgggatggcaggtaccaccctccctccgctcccctcccctccccaggtctctcttggcagtcatcatctggggtgggggggcggtagcccctgggaggcctgcgtgtgtgttgtgtgtgtcttcggatgttcacggagcaccgctgtgcaggtgctgtgccaggctttggggtgacagccgcaaacagatggaagccctccccagggccccacacattctgtgggggaggggtgcgaagctcagctgtacctagtacggtgtgtactggcttagggggtgtgttggccctcgcaggaagtacacaggctgcgtgtctggaataaggcttcgcatttctttcctttaacaaatactgagggcctcgctcccactgggctggtgccagggcctggcagtcaatgtagagggccttaccctcggaaagcaagcagtgtagtaaagtagacagataccagacagaacaaacagactggaagagtggagaggaatatatgaaagcccaaagtaggagagcctagccaggagtggtggcgcatgcctttagtactgacacttgggaggcagaggcaggtgcatttctgtgagttcgaggccagcctggtctacaaagagagttccaggacagccatagctatacacagagaaaccctgttcaaaacacaaaacaaacaaacaataaagtatgagggcctgaccactctgacaggtgggcttcttggaagaagtgatattgaaagagctgcaggccaagcaggagctagcaaggccaagtgaggatatataaaaggttccttgtagtcaggtggagtggcttaagcctttaatcccagcatttgggaggcagaagcaggtggatctatgtgttttgaggccagcctggtcaacacataatgagttcccagatagccaggagtacatagtgagatcctgtcttgaaaaacaaaacgaaaataaatagagataaaaggttccctgtgagcacagagcatcatgcatgcagcatgactctgccagctgagctatgtgcccccagccaggtggaaaccaatggggcaggaatgtagatagccagggatgcagggatggataggattgggctagttgtggccatgttctggagccaaggctgctcattgcgtgtgcataggtgtgtgtgcctgtgtgaaatatctgtggccagaggcctggggttccgtaagtcagaaggttctcgaagggcattagagctctggcacccgggctcctctgtgccaggttttcggttgtgtgtgttgcagggggaggaagtgggaacggctaggctttccctcaggaaagctgtgaagggttgacacccacaccccctccacgtgccaggcatgagtggtgagggctgggttactgtaggtagggtcatgttagaggcatgggggcccacgtaagagggcttttgcctgctgcagcataggtggcaggaaagcagcggggacagaaaggatggcgtccttcgggcacttccctccctttccagagcttggccattgccacctgtgtgctagcagagcaggtatgtcagcatcctgggcgaaggtggcctataagggggaaaactgctcgcctcaggcattctctctatttccacctgaagccccaagaggctcaaaacctcccaggaggtggaagaagatatccaagtcttcccccatcttctgctcttgtgtgtgtgtggggggcaggacacccccacagctagattgtgccggggtgtgcaactttgtggatgtggattggtgtgtgagcaggagaggagaacgcttgggttcaaggcatttgggtgggcattggggtagtggcatatgtcatgtaaaaatgagctctgagcaggtcacatcaccccattgagtatgactggagacaagagtatggttgttccaggaagtatgctggccacctttcgtagtcctggataactgcatctgtgttgcctggctctctctcggttctctcggaccttttctgggaaccttgtcgggactgagccttgagtttccagtgggaagagtccacctttaacccagctcctgtccctctcatgaccccctaaccaacctcactttccctaggatccaagtgaacgacctgctggtggaggtggatgggacgagcctggtgggagtgacccagagctttgcagcctctgtacttaggaacaccaaaggccgagtgcggtgagagtcaagggaacagtcagaaagctggtcctctccgcaccaggtccctgcccggggaattgtgcctgcagccccctgccaggcctgccttcccatcctgagatccctgatcaccactgagactcaggcttccactctccttgttcctccatgttctcctctcggtttattctcctcttcttctgcctctggctcgcctatggaaaaccaaactagcttctcccacctagagcttcatcccaggtcctgttgggctccactaagtctgtgtgctcctctggcaggtcacctgggaactgctgcctgccccacttctagaggggcactgcccccaggaaagggtgttagagagaaacaggatgtgggtggccaggggaggggggaggagctgatgcctggaagtcccactgtttcctccccgtgctaatctgcagttgccatcatcctgccccttcctgacccggggcttggagcacacccaagtcacacctctacaggctattccccattcccgaggatgggccattttgcccactcctgtgctgttggcttggcttggctttgtggttgttgtttcctctttggtgggaacagctcctatgccgagagcccctgagcccatgtcccctgtagccccgaagcatggttgacagccccttcccacagctggccaggaaggtgagcaggtcttcctgcttctcctggtaggcagccatgtgagagccccagctcccctattcattatttattctacagcttctggactcaggctctcagttcacctcccctgggagggcctaggtttggagggagggccccacacaacaaggaaggcagtggcattcccagctgtagccaggctggggtgacgccagaatgacagatgactctggtgcccctgcaggttcatgattggccgggagcggcctggagaacagagtgaagtggcccagctaattcagcagaccttggagcaggagcgatggcagcgggagatgatggagcagagatacgcccagtatggagaggatgatgaggaggtagggccgtgactgccctctggtggttagatgaagcagcgcactcatttgcctcaactactttttccaggcttggtaaaacaaaaagcaaaaaacaaaacaataacaacaaaaaacccccaagtcccaggggaacttatggtctgagagagaagcagaccctcccctcagagaactccgggtcaaacaggagagtcccactcttctgcctccctataattagaaggaaaacacagtcctctctgagtcttttctctggggggagcccctaatctagggagcctgattaggagagcgatgggtcctcaaggaagccgagttatggaggaaacagtacagggggttctgcaggcctgcagtgtccctattctagccgtggagaccccccagtccaacatgagcatactgctgctggtgtccggcctggctgcagggttgctgagggaagtggagtagatggacccacattgcctgcatccctccacagacaggagagtatgccaccgacgaagatgaagaactgagcccaacgttcccagggggtgaaatggccattgaggtgtttgaactagcagagaacgaggatgcgctgtcccccgtggagatggagcccgaaaagctggtgcacaagttcaaggaggttggaaaaggggggccctgggacagtgggggaaggcagatgggtagctggccctaggagctgagtgccaccctctgtccgcagctccagatcaagcatgctgtcactgaagcggaaatccagcagctgaaacggaaggtgagggtgcgcgtgcctgtgtgctcgtgagtgcctgctgaagaccccggctgaacgctggaggagggagctctgccttcacacaggcagcctcctaacatacgacggtttaccatgggctactgtgagaccagggatatcaggattaagggcccaagagctctggcccatctgttcccctattcattcacttgggtgtcttccccctcatatgtaaggtgtggtataagagcatagagctgggtagatgagaagccactgggacgatatatggaaatcctgcagcagagccaggaaggctgcagcctgctttagggtcagtgctcagtcgagagtcagtatcagcaagtccacggtgatgaaccaagtcttactccttgtgtatgtgtgtcctgctcagcagccatccactctgcacgggccctgagataagatagagactttttgacacagtggtgcatatagtgacacacgccagcctgaatccacagacccattcagttagacacctacacactccgtctgcaccgataatgatttccagacacccgtgatcgattctgtcaggggcattgtggcctgagtaggtagacccattctgtccttgaggttccagaagcgcacagacacaaccaccattcaggccacccggcctaggaagagtgtcagaggacgtgcacagttttacctgggccagcagcacacatgctcgtactaacagcaccagctggtaaccacacatggctactgtacatgcctaccagatgcttacaagcacattgggtacccacacgctcccaggcattggagacacacagatttctatatattgaaggagtcccaactcccacggggtttccgggatagtaggataaaccaatctccaggggccatggagatgcagcacaataggaatatgtgtgtcctctcccacatagatggaggagggcaggggacgggcatccagggcagtgcaggggtttctgggagcttgcaggctgactttggaaggaggcctggtagggtatggtagctgttcctgctgagagaggtgaagaggcagctagatggtgggaaagctagaaaaatcgacactgtgtagacctcacccttcaagaactgtagcctcggttctgcaggcacggagctgtggaccctagaattgtgttcgaagttcaccatctaggaaatgggggcgggtgtgggaaggaggcttgggggtaagaaagacttgaatatggacaaactggttagaggctttgtcggaggctgtcagggagagtcaggatacaggccagggatgagaaggaaggaccaggctgcatttttttgggggggtgggtgctctcaggacatgaagcagacggtgggtcacaggtggtttcaggagtcacaggtggtttcaggctcagaaagcaaagaggcattcaactgacagacatctaaggtaacttccagacagctaatgccacttcaggcacagttaggagtaaaggcagaattgaccctggtcctcgtgtgtcttaatgagtctgcatactgttatgtttctacctcagcctctagctcaggaagaaccctgtcccgttgcagggcagggaatgctgccctactgaagtcccagcaggcttctctgggaaattggtacacaacaggcttacaaggaagggtagatggggcattcctagcagaaggaactacctgaaaaggccttgtggcaagtgtgagggtctgcaggaaggcctgaggcatctaggcttagaaagcacgaggtgtttgcagcaagcaagacagaagtacaaccaggacccgtttggactgctgtgggacagcagcatcttccaccaggcagggaagtgataagagcaggctcaggctgggggggggggggggtccagggaacagtgccgtttggggcatggtacctcagacttcgaggtgggtctagattaggtacaggatcctgcgggagctcaggacttggggctctgtgcatagaactgctgtgtgaggtgctgctgtttgaagctacagagagcagaatgcagactgagctgtcaggaatccagtcccctgggagctggaaaggggctggattattcaggaatctccaaagatagggactggtcaacaaaccagggctacagagggctggctcagagctggtctggtggtgactgtctttcgtagctaccatctccctagccctgaggcatgtcactcccatctttaggataaggcagaagttgctaattggtggtgactcatgggtgcctgctaccgcccctagcagaactctaaggtcagcctcagagaattagtagctgggggccagttggctccaagagtgcaggaatccttagaagctgttggctccccccagggctcactctggtctcctccaacccagggctgctcttttctcacagttgcagagtctggagcaggagaaagggcgctggcgggtagagaaggcccagctggagcagagcgtggaggagaataaggagcggatggagaagctagagggctactggggtgaggcccagagcctgtgccaggctgtggatgagcacctgcgggagacccaggcccagtatcaggccctggagcgcaagtacagcaaggccaagcgtctcatcaaggactaccagcaaaagtatgtgtcaagagcgttgggtctaggcccaggcaggtggaggggcctttagtggtagtccccaccccagccttcctcccgctgaggagggagacagtggacacagagttagagggcaccacgatggggtaccagactcagccctatgggccttgggaaagcctgcttctctctggaccaaagccacaccattcacccgaacccaccatctgttccttgcctgtctccagggagatcgagttcctgaaaaaagagacagcccagcgtcgggtactggaagagtcggagctagccaggaaggaggaaatggacaaacttctggacaaggtagcgccctgggcagcctacagagtgagcagcatggaagctggaatccagtactcacttaatccatggtgtttgggaaggattgtggtgctggctgggagctcagggtcgtagcttagggtgggggtaaagttacagggcccgtgctgagtggccaggcctgatgcctcctctctttgttctctagatctcagaactggaaggaaacctgcagacactgaggaactccaattctacttaacaggaataactccttggccggacaataataatcccctcccattatcctcaccccctgtcctcaatccccaccccacccctaccagcctggggacaggtgccccgacttcccctactcctccaccccacctcccccagcttcagggaccagagggcccatattacaggcccctttagggtggccagggcagacaatgctggctggaagagtggtctccttgccctgtggggctgaggcgcagaggccgagagaagctaagagctggcctgggtggtggatggacacgaggacctgcagaccaaactgccagactttataacctccagcctgtgtctctggaccggagtggagctggggctctctcagcatctcaccacttggaggctgctccctgcccacagggtccgtatggcccctgggcctcttgacttgagattctccgttcttggccctttcctcttcccccatcattgtgctgtctgttgcattctggcctcctgcttggaggggttgcctcaacatctcccacccctgctccccatcccaggagggatagagcccacccttgagccagaggctgggcctgggcctgcactgatttgtatccttcagggggaggtgattgggcgtcgggggaagggtcagtccagcacacctggggtccagcacccctttcctaggaagggcaacagccctcaacttctccttgtgcctcccctctcccaggtgccaaacagccataggcgtcctcctggaactgccctgaggccactctgggcttctggtttccttggtctagcccaggaatgccaggagggagggaggtcagcttagatggtgtgcctgcagagctctccctggggagctaggccctgcctagggccacacctggaggccttgtattaccatcgaggagactctgcctcccctcttcccctcccccgctgttttccaacgttttcactggagggcaaaattttactaatctttttggagaccagggctgcttgctgtcagcctgctttctaagtgaaattgactcagtttccccactttaaccccaaattggggcttggaccaagggaggtgagaccccctcaggtaccctcccctttcagaatccatctcttgccacttccacattaccacccttgccctaagcctaaatttctgttcctttttttcttcttttgaaaacgacccagttctatccttttcggtttctccgagtcccctgtaaatagaccatgccatcaatcagtatttcttgcccgtctcttccgtccctagacgtgcccccgactccccggaaagagctggctgtcactgtgcccggcccctgcacttcacccaggcagatggagggggtggagccgggtgggcgggtcctcgatgtacttccggttttgaccggcagcgctcctgccccgcccttggaggaccccgtctctgtatataatatatatatgtatgtattgttcctggttttgtacggaccatgccctctgtcaggtcgtccccataaaagcagcccccagagcctcgtcgcctggtttcttgatgcgctggagtggggaggggaagagatgctagaaagtcctctccttttactaattttgcacatgatctagagaggatcttaatgctggttcggttctccgaccccagcaaactcacttgccaccactccctagttttcttgagctctctagacgatgtctttaggtctgtttttcacgaggtctttagagtagccagggatgggctgcacacagggaaagcaactccccttccctgaaaaccgagcaatctgcaagaccccagaggtctcaaagtaccaggaggaccaaagattccctaggagataagttgtcagagcattgtcctcacggtcaaagagaatgttctttggccctcctgagctggcttgagaggcctcatatagtcctagctgcccccttagctagctctcagttccaggaatcagttttggtgagtcgcagaagtgaattgtaatgagacttctgcagtacacaacacagccatttcttgtacagatccttgggaggcaaatatgttcagtagcttggggtggggttggggggtgattctcatctttccttctgtgataagcaaaaggccccatctccaggctctttgttcactttggttagcccctgataatatcagatatgagtgagttctctatatatgaatgccactaagccccctgggggaggcactccctagcagctagttccattgcagagcttgttcctgtcaggccaaataatagcttcctgttaatctaccctcaaaaccggttctgcacctcggaggccatgcagggcctgtccagctctgacacctactttcaggtcatcagaaaactagcaatggtggtggcctctcagtgtgtctcctctcttcagatcatccttggaacattgggaggctggggaatccaggtagatccaggggtggctgaatcccatgaaagcagcttccccaaacatgaagactcaggtcaccaggtcaccatgcctaggtgagaggtcgccgctcaggagtcctcgccaagaaacgaagcagctggcgcctcctgggtggggaaacaaatgagggtctgtaggagccatgcctacctcatggaggggacctttcctagatgttccaaggaatgcttgaatggtagctcgtgtttaaatattgagtatgttgtatggctgaccatcttgtgtgtgtcttttctgggagtttctcaggcctgagctgtgtcttacccatgaaatatgtccatttgggggtctgtcaaatggtgtgggtagattgtggtcatattaattccatcaaccaaagtaaatactccattaccatcatctactgaggttagatttgccttaacccaggcatgtgctgtagaggaggagttcaggtagggttccccccatatctcagcaccttaggcctgactaggagaaacattccattcaagcattgaaagacacacacacacacacacacacacacacacacacaccctataatggccctagagccacagtgcttaacctgtgggctgagaccccgcttcccagggatcatctaagaccatctgaaaacatatttacattatgattcacaactagcaaaattatagttatgaaatagcaacaaaaatatggtttatggttgcagcatcaggaagattgaggaccactgccctagagagtgtctatctgcacaggtggttggtcaccagagacatcatctcctccgtgtgaacctacagcctagccagactttctgcaggttctacatctatccagaggtccgcaagctctgggatgccctgagacccactgatgctgttcctactcacagttatcaggaactcctggctcaacgtgctgctgcccacgggcccttggcagtgtcccattcccacaagccatcaggagtactctatctctccagactctactacgctaagtcctgggctctctccaaggttgccacctactcctaaacaagtcatttcctttttgtgagtgtgtggtctgtgtaccttagaggacaagagaaacccctaactttagaggtttattgggaggggtgaagttaaagaatctgagaagtacctgacatatcccgagccttgctcctcggtagctagctgatgatcacacccannnnnnnnnnnnnnnnnnnnnnnnnnnnnnnnnnnnnnnnnnnnnnnnnnnnnnnnnnnnnnnnnnnnnnnnnnnnnnnnnnnnnnnnnnnnnnnnnnnnnnnnnnnnnnnnnnnnnnnnnnnnnnnnnnnnnnnnnnnnnnnnnnnnnnnnnnnnnnnnnnnnnnnnnnnnnnnnnnnnnnnnnnnnnnnnnnnnnnnnnnnnnnnnnnnnnnnnnnnnnnnnnnnnnnnnnnnnnnnnnnnnnnnnnnnnnnnnnnnnnnnnnnnnnnnnnnnnnnnnnnnnnnnnnnnnnnnnnnnnnnnnnnnnnnnnnnnnnnnnnnnnnnnnnnnnnnnnnnnnnnnnnnnnnnnnnnnnnnnnnnnnnnnnnnnnnnnnnnnnnnnnnnnnnnnnnnnnnnnnnnnnnnnnnnnnnnnnnnnnnnnnnnnnnnnnnnnnnnnnnnnnnnnnnnnnnnnnnnnnnnnnnnnnnnnnnnnnnnnnnnnnnnnnnnnnnnnnnnnnnnnnnnnnnnnnnnnnnnnnnnnnnnnnnnnnnnnnnnnnnnnnnnnnnnnnnnnnnnnnnnnnnnnnnnnnnnnnnnnnnnnnnnnnnnnnnnnnnnnnnnnnnnnnnnnnnnnnnnnnnnnnnnnnnnnnnnnnnnnnnnnnnnnnnnnnnnnnnnnnnnnnnnnnnnnnnnnnnnnnnnnnnnnnnnnnnnnnnnnnnnnnnnnnnnnnnnnnnnnnnnnnnnnnnnnnnnnnnnnnnnnnnnnnnnnnnnnnnnnnnnnnnnnnnnnnnnnnnnnnnnnnnnnnnnnnnnnnnnnnnnnnnnnnnnnnnnnnnnnnnnnnnnnnnnnnnnnnnnnnnnnnnnnnnnnnnnnnnnnnnnnnnnnnnnnnnnnnnnnnnnnnnnnnnnnnnnnnnnnnnnnnnnnnnnnnnnnnnnnnnnnnnnnnnnnnnnnnnnnnnnnnnnnnnnnnnnnnnnnnnnnnnnnnnnnnnnnnnnnnnnnnnnnnnnnnnnnnnnnnnnnnnnnnnnnnnnnnnnnnnnnnnnnnnnnnnnnnnnnnnnnnnnnnnnnnnnnnnnnnnnnnnnnnnnnnnnnnnnnnnnnnnnnnnnnnnnnnnnnnnnnnnnnnnnnnnnnnnnnnnnnnnnnnnnnnnnnnnnnnnnnnnnnnnnnnnnnnnnnnnnnnnnnnnnnnnnnnnnnnnnnnnnnnnnnnnnnnnnnnnnnnnnnnnnnnnnnnnnnnnnnnnnnnnnnnnnnnnnnnnnnnnnnnnnnnnnnnnnnnnnnnnnnnnnnnnnnnnnnnnnnnnnnnnnnnnnnnnnnnnnnnnnnnnnnnnnnnnnnnnnnnnnnnnnnnnnnnnnnnnnnnnnnnnnnnnnnnnnnnnnnnnnnnnnnnnnnnnnnnnnnnnnnnnnnnnnnnnnnnnnnnnnnnnnnnnnnnnnnnnnnnnnnnnnnnnnnnnnnnnnnnnnnnnnnnnnnnnnnnnnnnnnnnnnnnnnnnnnnnnnnnnnnnnnnnnnnnnnnnnnnnnnnnnnnnnnnnnnnnnnnnnnnnnnnnnnnnnnnnnnnnnnnnnnnnnnnnnnnnnnnnnnnnnnnnnnnnnnnnnnnnnnnnnnnnnnnnnnnnnnnnnnnnnnnnnnnnnnnnnnnnnnnnnnnnnnnnnnnnnnnnnnnnnnnnnnnnnnnnnnnnnnnnnnnnnnnnnnnnnnnnnnnnnnnnnnnnnnnnnnnnnnnnnnnnnnnnnnnnnnnnnnnnnnnnnnnnnnnnnnnnnnnnnnnnnnnnnnnnnnnnnnnnnnnnnnnnnnnnnnnnnnnnnnnnnnnnnnnnnnnnnnnnnnnnnnnnnnnnnnnnnnnnnnnnnnnnnnnnnnnnnnnnnnnnnnnnnnnnnnnnnnnnnnnnnnnnnnnnnnnnnnnnnnnnnnnnnnnnnnnnnnnnnnnnnnnnnnnnnnnnnnnnnnnnnnnnnnnnnnnnnnnnnnnnnnnnnnnnnnnnnnnnnnnnnnnnnnnnnnnnnnnnnnnnnnnnnnnnnnnnnnnnnnnnnnnnnnnnnnnnnnnnnnnnnnnnnnnnnnnnnnnnnnnnnnnnnnnnnnnnnnnnnnnnnnnnnnnnnnnnnnnnnnnnnnnnnnnnnnnnnnnnnnnnnnnnnnnnnnnnnnnnnnnnnnnnnnnnnnnnnnnnnnnnnnnnnnnnnnnnnnnnnnnnnnnnnnnnnnnnnnnnnnnnnnnnnnnnnnnnnnnnnnnnnnnnnnnnnnnnnnnnnnnnnnnnnnnnnnnnnnnnnnnnnnnnnnnnnnnnnnnnnnnnnnnnnnnnnnnnnnnnnnnnnnnnnnnnnnnnnnnnnnnnnnnnnnnnnnnnnnnnnnnnnnnnnnnnnnnnnnnnnnnnnnnnnnnnnnnnnnnnnnnnnnnnnnnnnnnnnnnnnnnnnnnnnnnnnnnnnnnnnnnnnnnnnnnnnnnnnnnnnnnnnnnnnnnnnnnnnnnnnnnnnnnnnnnnnnnnnnnnnnnnnnnnnnnnnnnnnnnnnnnnnnnnnnnnnnnnnnnnnnnnnnnnnnnnnnnnnnnnnnnnnnnnnnnnnnnnnnnnnnnnnnnnnnnnnnnnnnnnnnnnnnnnnnnnnnnnnnnnnnnnnnnnnnnnnnnnnnnnnnnnnnnnnnnnnnnnnnnnnnnnnnnnnnnnnnnnnnnnnnnnnnnnnnnnnnnnnnnnnnnnnnnnnnnnnnnnnnnnnnnnnnnnnnnnnnnnnnnnnnnnnnnnnnnnnnnnnnnnnnnnnnnnnnnnnnnnnnnnnnnnnnnnnnnnnnnnnnnnnnnnnnnnnnnnnnnnnnnnnnnnnnnnnnnnnnnnnnnnnnnnnnnnnnnnnnnnnnnnnnnnnnnnnnnnnnnnnnnnnnnnnnnnnnnnnnnnnnnnnnnnnnnnnnnnnnnnnnnnnnnnnnnnnnnnnnnnnnnnnnnnnnnnnnnnnnnnnnnnnnnnnnnnnnnnnnnnnnnnnnnnnnnnnnnnnnnnnnnnnnnnnnnnnnnnnnnnnnnnnnnnnnnnnnnnnnnnnnnnnnnnnnnnnnnnnnnnnnnnnnnnnnnnnnnnnnnnnnnnnnnnnnnnnnnnnnnnnnnnnnnnnnnnnnnnnnnnnnnnnnnnnnnnnnnnnnnnnnnnnnnnnnnnnnnnnnnnnnnnnnnnnnnnnnnnnnnnnnnnnnnnnnnnnnnnnnnnnnnnnnnnnnnnnnnnnnnnnnnnnnnnnnnnnnnnnnnnnnnnnnnnnnnnnnnnnnnnnnnnnnnnnnnnnnnnnnnnnnnnnnnnnnnnnnnnnnnnnnnnnnnnnnnnnnnnnnnnnnnnnnnnnnnnnnnnnnnnnnnnnnnnnnnnnnnnnnnnnnnnnnnnnnnnnnnnnnnnnnnnnnnnnnnnnnnnnnnnnnnnnnnnnnnnnnnnnnnnnnnnnnnnnnnnnnnnnnnnnnnnnnnnnnnnnnnnnnnnnnnnnnnnnnnnnnnnnnnnnnnnnnnnnnnnnnnnnnnnnnnnnnnnnnnnnnnnnnnnnnnnnnnnnnnnnnnnnnnnnnnnnnnnnnnnnnnnnnnnnnnnnnnnnnnnnnnnnnnnnnnnnnnnnnnnnnnnnnnnnnnnnnnnnnnnnnnnnnnnnnnnnnnnnnnnnnnnnnnnnnnnnnnnnnnnnnnnnnnnnnnnnnnnnnnnnnnnnnnnnnnnnnnnnnnnnnnnnnnnnnnnnnnnnnnnnnnnnnnnnnnnnnnnnnnnnnnnnnnnnnnnnnnnnnnnnnnnnnnnnnnnnnnnnnnnnnnnnnnnnnnnnnnnnnnnnnnnnnnnnnnnnnnnnnnnnnnnnnnnnnnnnnnnnnnnnnnnnnnnnnnnnnnnnnnnnnnnnnnnnnnnnnnnnnnnnnnnnnnnnnnnnnnnnnnnnnnnnnnnnnnnnnnnnnnnnnnnnnnnnnnnnnnnnnnnnnnnnnnnnnnnnnnnnnnnnnnnnnnnnnnnnnnnnnnnnnnnnnnnnnnnnnnnnnnnnnnnnnnnnnnnnnnnnnnnnnnnnnnnnnnnnnnnnnnnnnnnnnnnnnnnnnnnnnnnnnnnnnnnnnnnnnnnnnnnnnnnnnnnnnnnnnnnnnnnnnnnnnnnnnnnnnnnnnnnnnnnnnnnnnnnnnnnnnnnnnnnnnnnnnnnnnnnnnnnnnnnnnnnnnnnnnnnnnnnnnnnnnnnnnnnnnnnnnnnnnnnnnnnnnnnnnnnnnnnnnnnnnnnnnnnnnnnnnnnnnnnnnnnnnnnnnnnnnnnnnnnnnnnnnnnnnnnnnnnnnnnnnnnnnnnnnnnnnnnnnnnnnnnnnnnnnnnnnnnnnnnnnnnnnnnnnnnnnnnnnnnnnnnnnnnnnnnnnnnnnnnnnnnnnnnnnnnnnnnnnnnnnnnnnnnnnnnnnnnnnnnnnnnnnnnnnnnnnnnnnnnnnnnnnnnnnnnnnnnnnnnnnnnnnnnnnnnnnnnnnnnnnnnnnnnnnnnnnnnnnnnnnnnnnnnnnnnnnnnnnnnnnnnnnnnnnnnnnnnnnnnnnnnnnnnnnnnnnnnnnnnnnnnnnnnnnnnnnnnnnnnnnnnnnnnnnnnnnnnnnnnnnnnnnnnnnnnnnnnnnnnnnnnnnnnnnnnnnnnnnnnnnnnnnnnnnnnnnnnnnnnnnnnnnnnnnnnnnnnnnnnnnnnnnnnnnnnnnnnnnnnnnnnnnnnnnnnnnnnnnnnnnnnnnnnnnnnnnnnnnnnnnnnnnnnnnnnnnnnnnnnnnnnnnnnnnnnnnnnnnnnnnnnnnnnnnnnnnnnnnnnnnnnnnnnnnnnnnnnnnnnnnnnnnnnnnnnnnnnnnnnnnnnnnnnnnnnnnnnnnnnnnnnnnnnnnnnnnnnnnnnnnnnnnnnnnnnnnnnnnnnnnnnnnnnnnnnnnnnnnnnnnnnnnnnnnnnnnnnnnnnnnnnnnnnnnnnnnnnnnnnnnnnnnnnnnnnnnnnnnnnnnnnnnnnnnnnnnnnnnnnnnnnnnnnnnnnnnnnnnnnnnnnnnnnnnnnnnnnnnnnnnnnnnnnnnnnnnnnnnnnnnnnnnnnnnnnnnnnnnnnnnnnnnnnnnnnnnnnnnnnnnnnnnnnnnnnnnnnnnnnnnnnnnnnnnnnnnnnnnnnnnnnnnnnnnnnnnnnnnnnnnnnnnnnnnnnnnnnnnnnnnnnnnnnnnnnnnnnnnnnnnnnnnnnnnnnnnnnnnnnnnnnnnnnnnnnnnnnnnnnnnnnnnnnnnnnnnnnnnnnnnnnnnnnnnnnnnnnnnnnnnnnnnnnnnnnnnnnnnnnnnnnnnnnnnnnnnnnnnnnnnnnnnnnnnnnnnnnnnnnnnnnnnnnnnnnnnnnnnnnnnnnnnnnnnnnnnnnnnnnnnnnnnnnnnnnnnnnnnnnnnnnnnnnnnnnnnnnnnnnnnnnnnnnnnnnnnnnnnnnnnnnnnnnnnnnnnnnnnnnnnnnnnnnnnnnnnnnnnnnnnnnnnnnnnnnnnnnnnnnnnnnnnnnnnnnnnnnnnnnnnnnnnnnnnnnnnnnnnnnnnnnnnnnnnnnnnnnnnnnnnnnnnnnnnnnnnnnnnnnnnnnnnnnnnnnnnnnnnnnnnnnnnnnnnnnnnnnnnnnnnnnnnnnnnnnnnnnnnnnnnnnnnnnnnnnnnnnnnnnnnnnnnnnnnnnnnnnnnnnnnnnnnnnnnnnnnnnnnnnnnnnnnnnnnnnnnnnnnnnnnnnnnnnnnnnnnnnnnnnnnnnnnnnnnnnnnnnnnnnnnnnnnnnnnnnnnnnnnnnnnnnnnnnnnnnnnnnnnnnnnnnnnnnnnnnnnnnnnnnnnnnnnnnnnnnnnnnnnnnnnnnnnnnnnnnnnnnnnnnnnnnnnnnnnnnnnnnnnnnnnnnnnnnnnnnnnnnnnnnnnnnnnnnnnnnnnnnnnnnnnnnnnnnnnnnnnnnnnnnnnnnnnnnnnnnnnnnnnnnnnnnnnnnnnnnnnnnnnnnnnnnnnnnnnnnnnnnnnnnnnnnnnnnnnnnnnnnnnnnnnnnnnnnnnnnnnnnnnnnnnnnnnnnnnnnnnnnnnnnnnnnnnnnnnnnnnnnnnnnnnnnnnnnnnnnnnnnnnnnnnnnnnnnnnnnnnnnnnnnnnnnnnnnnnnnnnnnnnnnnnnnnnnnnnnnnnnnnnnnnnnnnnnnnnnnnnnnnnnnnnnnnnnnnnnnnnnnnnnnnnnnnnnnnnnnnnnnnnnnnnnnnnnnnnnnnnnnnnnnnnnnnnnnnnnnnnnnnnnnnnnnnnnnnnnnnnnnnnnnnnnnnnnnnnnnnnnnnnnnnnnnnnnnnnnnnnnnnnnnnnnnnnnnnnnnnnnnnnnnnnnnnnnnnnnnnnnnnnnnnnnnnnnnnnnnnnnnnnnnnnnnnnnnnnnnnnnnnnnnnnnnnnnnnnnnnnnnnnnnnnnnnnnnnnnnnnnnnnnnnnnnnnnnnnnnnnnnnnnnnnnnnnnnnnnnnnnnnnnnnnnnnnnnnnnnnnnnnnnnnnnnnnnnnnnnnnnnnnnnnnnnnnnnnnnnnnnnnnnnnnnnnnnnnnnnnnnnnnnnnnnnnnnnnnnnnnnnnnnnnnnnnnnnnnnnnnnnnnnnnnnnnnnnnnnnnnnnnnnnnnnnnnnnnnnnnnnnnnnnnnnnnnnnnnnnnnnnnnnnnnnnnnncccagtcctcgaaggacttggcactgcgctgcagagtccaggacccaagaaacaagttgcaggggcctgtgggaactttgctcctgggtctgacactggtgtgtggtcacgaataacacagctatccttaaatacagccttgagtgtggcacagcaagacagtgtcaccaggagggactgttcctagagtcacactccagatgatacactgtcactagtcagtggctccagttgtgacttgccttctttgatcctagttggctcagctatgaaccatggcccagatgctgtgaccctcacccccaacccaggtagctctaaggaggaaagtgaggtgtatagcattgggtacatgaagatgcctcttcatccacctggtctccactgcttttccaatccactggggagtacctatttccacagagctatttcctgccacccaggggttccatctctacttcttacttcccacccattccaatagtttgccaactcttactcaaactttaggatccaggtgggtgtgcctcctcttacccctgtttctgtgagtgtctgcacataggccagccatgcccacaggaggacctgggatgatagcaggtggggttatgagcccagcccaactgtggggcacccacatttcaacccacaagcacagtaggtggtactcccaagcaccagttaaatgactgggatgttggcccatctgaggtggctctggtctccgtttgcagacctggacttggctgtaccagagaccaccagactggacagcagcttacacaaagccagggctcaactgctggccaagggccggagacaccggccttcccgttccaggctacgagacagtgccagctctgccgaggacggtgaaggctctgatgggcccggaggcaaggttggggtaacatacacacaccaacatcctacccctggaccataccccctccctcacgcttccagggaagtgtgtgcccccggagatgctcccaaagatcagttagcagttcacttctggctcctgtacctctgtacaggaaaagggattgttagcccattttacagatgaagctgagaccagaaggttcgggaagtcccattaactgtgggatgtgcaaatgaagcaggatgtcttcacttcttgtgagaatccatttctccagccccgggtcccagaatacctgctctccagaccccaagaaacagagcttccttggcgctcctgtacagccgatgggggaaactggcctccatcctctgggaagtcaggggggacgctgaaccgctgcccctcttctaggtgaccgacggctgcggtagcccgctgcaccggctgcgctcgcctctacattcgggtccaggctccccagccagtggatctttctgcctggagcccccgggcttgaggcgcagtctggatgaggacgaaccgccgccctcgccactcgctcggtaccggcccctgcacaacgccgcctcgcatgagggcctggccgccacctccggctcgccaccacgctctgcaccctcctccgacagctcccccagcttcgtgcgtcgttaccctcgagcagagccgcacagcgaaggtgagctcggtaggcgcggcgctgcctgccaacgagcatcgagcatcagaatcgcagctaggccaggcagttggggtaatacaggggagacagaaggctggctggccatcaggttcccttcttcatttacagaagcttactatatgccagacaccgctgtgcccatacagagaatagagacagcccttggcctctggggacgtgtagcttaggaaagaaacaaccaaatcaccccataattaccgtataggtacaagctgtaataaaagctatgcaggaaatatgcacagttgttaagtgtcctcacctgactggaaatgcttccctgaggaggcaacatttgagccgagattgaaagactggttagaaaacggtcaagataaagtcagtagtatgcctagcaggcaggaaacatgacagaataccagatatggtcatgtaccctggttttcagtactcaggaggcgaatacaggagagtcagaagtccaaggccacatagggagctccagagaccctgtctcaaaaaaagaactaattaatactaatacctttggctgggtggtagtggtacatatctttaatcccagcccttaggaggcaagaggcaagtggatctctgagtttgaggccagcctggtctacagagtgagttctaggacagctaaggtaacacagagaaaccctgtctcaaaacaacagcaacaaaaccaaaacggtcctgccttctcagatgtaaagtgcttttacagtttgtaaaaggcaaaagcctaggctcccattagatactgtaaaattggctcatctctgcttgaaataagacacacagacagtgtcttatcctgggtcacacagctaatgaagaaccctagggccaaatggcctaattctacgtcaagaaatgtctacccgacacaggcggcggcaggaggccagcagaccattgcgttagctgttttcctccccttctctttctaaagatgacagccgggatgccagcccccctgagcctgccagccccaccatcggcttggacaagaagactcgcaggaaattcctggacctggggtgagtggggacagatattgcaagtgtccttggagctgttggggtcagagcatcacagtgggcaggtatgccctacttctccccccctgcctccttccagggtcactctccgccgagcatccaccagcaggagcaggaaggagaagggtagcaaccgcctgtccatgggcagcaggtgagaggtccccatggcacccacccgcccacccacagctcccacccactcctggtcacccacaccatgctggatgctttctccacagggagtctgtagaaggttctggaaggacaggaagctccccgttcctgcccttttcctggttcacggacagcggcaagggctctgcttcctcggggagtaccacctccccgacctgttcccccaaacacgagggcttcagccccaagaagtcagcttcccaggtaagcccaggtcttcattccttctttttctccttccttcttctcatctatccttccctcccttctttctttttccctgctgaggcagtcttactctgtagcccaggctggcctggaactacacagcctcttgccttagccttctgtgtgctgggactagaagaatgtgccatccttcccagtgtaaccccgggacgttcttgccccacactggcttctaggctcaggacaagaacatacttcatcgtggcttggactgggacccaggtttttctgggacccatagtgtccctctacagagctgcctggtgactcatggcttgcttctactctctggcttcattcagtcatgcctcgtgcgttcgtacccattcgtatttcatgtgtttatactgctccctatactcagaactcctgtgggaacactgaggccctccactgctcactcagtctgaggagcccttcttcttactgttctgcctgagtcaggtctggactgtgcagtgccatcaagagctggccatgtgcatgatgggaagtcttggagatagcggagatgagcaggacccccacgtagtcttctgaaagctccagaccctaggcgataggaaccatcaacacaaccaatactaatgtctccttatgttcacaaagaccactattgtctgtggctttaactgtgacttaggcaaggtagtcattattatctgcattgtacagataagcaaatgaggtttggggaaaaggggactcacccacagatgtgcacagctgtgtatggtgctggggcttaggggaatcagaaatcgtgggattcaggggaaaggcccgtctgatgtgcagctttagtctataaccacctgatagtcttcctcagtccctccctttgtgctggtcccaagggacaccatgctgagagagagacagcccaagtcctcacagagattcaaggccatttgggggtacccaccagccaggatgcaagagttctaggagaaggattcttttgtaaaagacttatttacgtattatgtaaacaagtgttctgcctgcgtgtatgcctgcaggccagaagagggcgccagatctccttatagacggttctgagccaccatagggttgctgggaattgaactcaagacctctggaagagcagccagtgctcttaacgtaacccgtgagccatccctccagcccaggagaagaattgttatgtaacagggacacatgacccagcctggggggagggattctggtaagctgcctataggaagcagcacctagccccctccattcctcttcatccatcagcctaacttaatgctaggactatgtcctctaggtagtccgctccctcctagagggctcaggttctgatatgtcacttcagtcatcacagcctgtgtctggctgtctagttctgagttcctggtcctggagcattgaacggctgctggtgcctagtgtagtatttcagcttgctctggtcaggtgatgggcttggggtgggaggtggacttacttctcggcacacgtccctttccatgtaggaatctaccctgagcgatgactccacaccccccagcagcagccccaagatccccggtggtcctcgacaggagaccaagtgttcctatccctaccacacgctgtcccagtcttcggatgaggtgagtgaggctggcctttgtgcctgctgggggggacccagccgcaggccaggcttcctgtactctccccatctctatcagttcctggatgagtccctccctgccgtacaacactggaccagccagcaggtgggccagtggctacacagcctcaacctggagcagtatgctgccgagtttgctgcccggcaggtggatgggccgcagctcctgcagctggacggaagcaaactgaaggtgggtcagagtgcagaggtgatgatctttcagattgagatagcttttagggacagaaatcaccctttgtcctgacttttgaccctgacttacctcctggactgacctggcattggctctccctgtgtagcctctgacccggtgtctgacctctatgcaaggtactcctttcgcagtgtagtacaacacctccatctgacttgaaactcaagcctaatcgcttctatctgaccttctagctccagcccgggtctttgggctgaccttgatctttggactaccatcaaggccactttcttggccagctccatcccatattcattctcagatcctggataccaccaggctctggcgtgctaagtggacagtgtggagaggtggcctccaatatctgcaggttcctgggactgagggagagagagccccataggaactctcttatttatttatttatttatttatttatttatttatttatttatttatttattatatgtaagtacactgtagctgtcttcagacactccagaagagggcatcagatttcgttacggatggttgtgagccaccatgtggttgttgggatttgaactcagggcgtttggaagaacagtcggcgctcttaacggctgagccatctcaccagccccccataggaactcttgaaacgggaagggacctagccgataagccacttgaccttgaacaagtcactcttcactctgaggacctcagaggttgagcaggatcatactaaggctgaaatcctaggttaaggatctggcgccaaggacggggtcgcaaatggcctagtgccagagagttgtcatctctgaccacttgcaagccattcctcctaccttgggaccccgatccctaggcaaaggccagacttccgagcagactctagtgggtctgtggggcagcgttctaggcctctttccttcattctggatttcttcccagagcctggggctcagcaattcgcatgaccgagcactggtgaagcggaagttgaaggagctggcagcggctgctgagaaggaacggaaggcgcaggagaagaccgcaaagcagcgggagaagctgcggcgccgcgagaacgatgccaagaagagctagggatggctggcggggctggcaccccggcgcacttgcagccacctacatgggcctcaccagggaggcagggtccaggcaccaggctctcggagcacgcggcccccctctcaccctgtttggactgagtcctctggagggagaccccaggggggagggcccagtaataaacccaatttcgaggacttgtttggcgcagacttccagggggaagcaggtggcagatgaagagggcagaggccaggaatgcagcaaacgcggagcccagaggagcctggttcaggtggaacctccgccctctgactagagtggtccgagcaggaagaaatctagcaggagaggccctaccatggccaggattcctaggtttagagagtagcctgggcaacccgactggagacaggagacagctgtgtctcctcaccttttgaaggtggctgtgtggtgggagaacagatctccccagagaggccagtgggcagtgccagtagcactcagggtggattcccagacacctcctcagaggagagagagagcagggcaggataagctggcctctgtaaggaaggcagagggggagaagggagctctcactcactctctctctcttcccctccctcacctgcaggttccagcacacaggtctgctcctctcccattgagtccctttcgcagagctaaaatccacttcttcggagagtacttgagccttcgagggcaggaaaaattgagagctgttggggacacgggtcactcccccaactagtgtctagatggtgaagaggcacaccctaagtgtggcctgcatgctgccagattgaaagggtccatcagcttccctggtgccctgggtgtgtcaaggcctcagaggcctggggcggatggacagacactgctggcttaggtttgctaggctacagagggggactgggccagccccgcgtgggactggcacatgtcctttgtagggcgtgttcagagatagagggtccaggtgcaatgctgacccagcttcttgggtgctggtcagttactactaggcccaggttttagatgacaaacccccacccctcccagtttcctggagaggtgaacaggacctgcatgttaactccctctctcctgcctgggaaagtggctgaaggccagggccctatgtttgtgctcagtcaccttcactggaagagggggcctcatagggaaaactaaggtatcggggcactggcacttcctagactgggtggggagggtggaggctctactgtccccgaagccgtgaagagccaagtgtgcccacctgcatgtgaagggggaagatggctatcaacttctttcaataaatacttaccacacaccagtgatcttcttgtctgggacaagggactaagctacgcctgagtggacggccctgcctggtggcgtgttcagctggcctaggtcctgagtacagttagtcctaggggaccagtcttcacaggtgcttcatgtgtgggctccccctccccgagcaaggaagccaggcagcagtcacatttcatctgtttactgtggatgtcactgtcaccatcccagccactgggagggcacacggctttaacccctgtgtgtggaggggaagggcagggcttctgagattacaaaactggctatgtacatagggctgtcctaggggtgagtcacttgtgcacacatagtgggcataggggtggggtggggtctgaagctcaggcagcatagggtgggtgtagactgggcaggggaggtgtgcacgtgaggacatgctgggtgggcaaggctttaggaagcagctaaacagaaacattgctaagatcaccttgggggcagcttactcctaggcctgccctctcggtgggccccgggtgagaatcgctacctactctcaagttcccaattgcaacttcataccatccagagtagagatagaggctgcaggatcagagtcaagggtggaccctatcttcccccagtccctctccagacttgagggcactccatccttcttaacattgacaaagaacccagcccaaatgtgcctgtacagtgtgtgggcataaggcaagcggagcagccacttggaaggccaggactatgcaggcagtgagggggaaccagggcttctagtagaaaacagacagttctgatcttgggagaagtgtctctgggccaccccatcagggagagccatccccaaccctcaagcatcactatggaaaccgggttccagggaaaccccctagggtttctccacagagacatattggcacttagggaccaccacagttgggccactgagatttctacaaagacagatctggccatcagggagacccagtttcaccccttgtaccctaggggatagatagggaaggtccctgtggtggctggattcagaggtggcagcatcctacaggtgccagggagggaaggcccctagctgacccgatacgtcgatgtgttcttgggctctgtgctgggcacacaccagtcgccggcctcctggatggtctggtagtggcgccaggcagacttgttgtagacaggcaggcgctccactgagtccgtggacagggcctagagagcattgccatcaacctcctgcttgcccacaccccagcttactaccctctcccacccaggccctgatggtctccatccctggagtcctaacccaggtctgagtcagcctcataaccaggcattagcctgagacattaccccagacctggaaaagcccctaaaagagtcagccttctgtctcttgccctggcccattccatgaagctggcccctccacgatcaggggggcaaaaaggatcaagagggagggaggctttgctgtgtgatccctattaatcaccaaggtacactcggatcaactgaagttcaagacctgtaaggttcccttccttctagcctagggtttctcagaagaggggccttactcacagaccttagaccccctgaagttgcctaccacattagtttaaagttacagtgcttgaggagccaaggctcctctgagtcttggagagccaaaactgagtttggagtcaggaaggatgagggatgggtagaaacccgttagcagccagcttgcccctggcgggcctcaccttcagatagatgacagcatctgtcccaaagccctccatagagaaaagctgcaagtccccctggaagtacttggcgtagaggcgggaaatggggagtccgtacccaaagccagcctacagaggagccacaggtcataaagtgagccaggaatgctggactggggacaggcaggggcgctggagcaggggtggagaagggacatttctgaagcagatgggagtaggtgggaggcagggggactgcagaggatgcatggagagacgctggtctgggcgggagagttctacccaggccggtggttaaaagctccttagagtctattccctaagcctaggactgcctgttccacaggagcagggacagaggcgacagcaattagcaatgcggtggagaaagaggagagagggccaaggagaagtgacagctaaacagatgggcggatgatcagcaggcagggggctattagcaaacggtagagagagaggaggccctggagtcacaacaggagactgttgtcacaccacacagccatggggtgggctgtggggagggggatatgcttgggagtttaaaaagcaggagccaggggactggaggaaggcgtctatctcaccagcggggtacccccagtgccaggctggggtgtgggagctgtggagtacatgtagctgaagagcctctcgatcttcctcaaggggacacccccgcctcggtcactcatctgggagaccagggggcatgtgagataccctccaaggttatgtgctccactcctccctctgccccccgccccaccctgtaacctcccatggccaagtcaagggtcacatactttgatggacagatcttcttcaccgagggccaccataatcttgatgggggggagtgtgaggctggactcgtggctttccacagtggcccgcatggcattctgggaagggaatgaaggatgatgcagtgagagaagccagccccaaaggtacctgctgaagctgggggccaagagctgaccctgcccagcccctacccccacccccgagaagggtagcctcttaccttaaagagttcaaagagcatgtggtacaggtgggaagggacatagaccatgtgaatgggctggttggcgttggtggctgtgggaatggagaccagggccaggagtcatacagcaaggtcaccttcaaagcagaccttccctctctccacagctgtacctagcctaggtggctaagtggctgcacccactccgagcagccacagctagtaacccttagaagccccaagttcaaccctgcttcttccttccttccaggcatgggaggcctgggtaccggctctgaccaccggaagcacctctcgatgaagatgctggttcttgggttgggggcatcacgcatcactctccagtctccggcctgttaccccacaccctgcccctcctatcatttgtgaggttttcaaattagctggtgtgtttgcatggtcagtggtcacctatcacaggtctcaacctccctagcaccaagaatgtacgctctgtgaggacaggggccttgcctgtcttctttacatgttgagtatatcaaatagtgagcaattatccaacaaattggtaatacagagcagctcctctctaggggggtctgacctcctagctcccctactctggcctgcctgggtacatgcacacatacatgtacacacatatacatacacatacacatacacgcgtgtaatcatatgtgcacacacatgtagatacacatgtacacacactcatttgcttaccattgacttcctggatctccaggtcaggggaagccatgtaatacttgtcacacaggagcttagccatgtcataggcgtctgggaggagacaggaccactcaggttatgggaggctgacccagcagcagtccctttggcactgacgtgaaaactgacatgccccccccccccatctgctgggaatggatcaccttctgacctggctatttgggaggggtccctggagctcctttgtgggccaggcctatggtgggggggctcacctttcaccacatcagacacgctgcagttgggatcgatgctgccaatgtgtttggggtgggctgggttggtgctgccatcaaagatgagggctgtgggcagagggaagggcgcggttggcaagttcacaggatctagttctccctcttcctaaacaccccactcttcacctcatctgtaggcctttgtatggtccatgctaaccatgccccccaagtcttgtttccctctagcttgggccttccagagcttctgcaccttacagcagtccttccatagtcctctccacatcataccctgttaagtgtatgtatatgtatacatgtatatatgtatgtatgtgtatatgcatgtatacatgtatgcatatgtgtttatgtgtgtacatatacatgtttgtatatatgtatatatgtatgagtatatgaattatgtgtgtatctatatatgtatgtgtttatatatatgtgtgtatatatgtataagtgtatgtatgtgtgtatatgtgtatgtatatgtgtatttatgtgtgtatgtatgtatacatgtatacatgtgtatgtatatatgtgtgtatgtatatgtgtatttatgtgtgtatgtatgtatgcatgtatacatgtgtatgtatatatgtgtgtatgtatatgtgtatttatgtgtgtatgtatgtatgcatgtatacatgtgtatgtatatatgtgtgtatgtatatgtgtgtatacatgtgtattatatatgtatgtatatatgtgtatgtatgtgtacatgtgtatacatgtgtgtatatgtgtgtgttatgtatgtatatgtgtatatgtatgtgtgtatgcatgtgtgcatgtatgtatatatgtatgtgtgtatacatgtatgtgtgtatgcatgtatgtatctgtgtgtgcacatatgtatatatgcatgtatgcatacatgtgtgcatgtatatatgtgtgtgtgcatgtatatatgtgtgtacatgtatatgtgtgtgtatatatctgtatgtatgtatgtgtgtgtgtgtgtgtgtgtgtgtatgtattttcttttttttttttttttcaagacagagttactctgtgtagccctggctgtcctggaactgactctgtagaccaggctggctgtgaattcagaaatccgcctgcttctgtctcccaagtactgtgcatcaccaagcccagctttaaaggtacgctttgctttcatatcttcacacaatactgtaagataacttccatcagcttgcttttcttagaacataaagaactcacttaacttagctctgctttgtcaaccagcatagaaaactctggacaggaaagggtaaatgataaaccgtttttgaatacaatggagttcttaatgtgttgggtgtgggtatgggtgggtgggggacagcatgtgtaaatggctcacaaggtggctcagtgcgtaaaggtgcttgcagcctagcctgacaacttgagttcaatccccaaggcccagatgatgaaaagagagcgtaaactgcaggatgtcctctgcccacaacatgtgcacatgtgcataaataaataaatataattgtttcagaacacgtagcatgtttgacatttacaaatatttacaacaacagaatttcacctcagtgttgcactttttactttactttgggaaccaattactttttaaattttctatttacttaatttttttgaggttggcctcaaacatatactattttcctgcctcagctgcccacgtgctagggttatagacacatgacttaagccacactcttcagttcccaaatgccactcaggcctctgagcccagaggctgaagtggggagcctgctttcttgtgggggcggtgcccttcttggcgtgccctgccgggccccttgccctctccgaagcagccaggcaggactcactgtgttgattgattagcattcggatggagatgcggctgaggtagaagcggtccaggaagtactggatgttctggttggagacggggtcatcgccataggtgtccttgtactccagcactccctgtgccatggtgggcaccacgtcattgtgccggttccggatggtgaccagggcatctgtgaaccttcagagaaggcagacacttgcctctacccagtctcaggtttggggacaccctggctctccattattcccaatggcctatcagttccttcattttctcctccccagacccacagacacacggaagctcacccactggaagcccaccactactgtcccagctctccatccatcttcctgtttacagctaaagttctcggtttctctgaaggtttgttctgggggcagggctcccccacatcctcttgctatactgataattagcattctcgtctctcgcagcagacctggttttcccagaagtagcctgtctcccccctttcttggcacatccctgaaggcagggcctttccctgtacccagctggcattccatccttgtggccctgaccaagatgtccttgcctgcacctgccttcttgtccctaaagagggtgctcactcactggcttagagtccggtggtcctcggggtctttgtccaggaattccatgatgtccagcagactctggacatacctgtgtgaaagcagagaagttcataagcccagctgagactacacaatgttccctctcacccctcagatgctatggtaggtggcgcacagagctgaacaggctgacaatcaacaccccattctatccgctccgggtctccctgacaacctagtaagttgtccaagaaaaccttgaatttgtcagttcccttaacagtgcatgtctttgctccagaacccgattagcagcaaccttgggagggtccagaaatcaccccctctctagaggctggagagaacaggggtctgaggcccaagtgtcctacagtaacagagggctcagacatctacctgcctcgctgagcccctttattgacaaagatcctggtatctccatagggggctgaggcttctagtggacaacgggtgctgccagcaggctagctgctgacacagaacctcttcccagagtgatctggaacctgcctcgggaaccctcggtttaaaaggtgagtaggtgtggttagctctgtcctcagggaggaccagggaggctcattctgctctttgaagccaatgagcagggagggtgtgggtgagccctgctgtccgtaccacctctaggcctggtgggtggggcaggcctcctctccaattaggaaaggttaatgaataaagaacgggggtggggggggagttgagccctgagcttctgcacgtgaggtagggctgcctgaggcagtagatggtgccaatctaatgtcactgtccccttgcctgactgagccacgaccttagcttcccctccaggcatgctccagcctgagtcttattctggaaatgtgaactgtgagcctagggcagaaacacttctggtctgagggctgggagggctacctggagtcctgtcatggggagcccctgagtctctagtggagacactaggttaggacctattcgaaatcacccagagctctgagaggagaggaaggaatgggccccgcagcagtgtccccactgggtgggagtacagccgagccttgtggagctccagggctcctgccaccaacagggctgccgttgctctggatctcaccccggcctccctttctgtgtagaatgccctgctctttgcaccccacaactgctctttgctggtgccgctgggttccagtgtggccctggattagctgcggcacttctctgggcttgttttctcactaggaaaggtgggagttcttatccttatctctcactgcgcagtgaatgcgcttgaccgatggccactcaaaacctgtctccagctgagcacacccactcagctccactactgccgcgccttaggctattcggcgccgccgggagcaggagcaggcttggtctggggctccttcctcttcgtcccaaccagaacctaacacaatatctacgggggtcgctgtggatgggataaatgaagaggccagcttcctgacagtctcccttcacccctgcccagatacctgcatcaggaagaccttagtctccttagacaggcatggcagctggcgttcactgagctacttctgtgccctcatcactgctgcctatctgggctcagaggcccacacagggcctttgatcactagtaggtgaggggactttgagggagaggggacttgggagagaagctacaagtgtgaatgtgtatgggggggcgggggagaggaaaggacagagcagttggagggtgggccacatgactcctcctcaagatccacgggggtggggggcagggccccaaaaggccagaagcagtaggctctgtgcttgcccagaggtggtggatgtgggtgagccgtgggtgagccgtgggtgagccgtgactgttccacctctaggcctggtgggaggggcagctctcctcttcaactaggaaaggttctcaggagtaggatgctctgtgcacgcccagaggtataaacaggcagggtcctagcttccaaggccgggcagggctgtagagtgaactttcaggagaagacatagaactggtgacatggccactgccgtggaacaagggccacctggatcctttgacaaaagtcaaaactgtctgggttgctgtggggggatactggagactgacatccctgcctgtccctcaaggggccattttccatagggaaaaaatgctgggtgctcctgattctccagggaagaacaggggaggctgcttctgctcagggcccttggtagcaagccctaaggtgcccgtgggcctggccttccatgtcaccctgggattgggatacaactagatcctccagagagagagagacactgaggtagggttatgctgacccttgggtagcccctctccagagccagggagaggttaaggcacagtatgagtccaagttgagaggaggcagcctagagtctaatctacccccctccttcttggtaaaatctagtgtctccaatgccccggtataacagagacacacacccactccctagcccataccctccagggagtggaatgcaggcccgaggggagaggcgggtagtagaactagaagagggaggagggcacgcagccacctgcaggcactgtgtgggagcagagagatggctgagccacgggaataagtgtgtaaatggaaagagtgtgcgtctgtgggtgtgtagcagcatcaacagctgccgcccacggacaacagtgtgaaccagaccgcagtcctgggagggaggaaggtggctactcacacaaagggcgagggcagaggtagcccccatctggagtcactctgtgaatgggcagtgggcttgggtttggacactggctgttcactgaaggccactgggatgctccagcccaactgcaaaatgcacttcacagccggaagctcggggctcaaggttgggtagggcttagctttaaaatcgccttggggatcactccaagggagactactgggtcaggtgtgctggtgtactgaggaaccggctagtttaatgcaggctccacctcttgtctatggaccttctgcccctcattctgctcaagacaagggcttgctggcttttgtgggatgggagtgggactcttcacaggcagggcttggggtccacataccataccctgtggacaagccagggagaaggatgtccactctcacacacatacatacatacccaccgaatcatccgctcccacacaccccttacaactctacaaaacccagcgacagcagtggctcactggctgtgtttggggaagcaccctctgcctatccacgcctcttcgggtggtcttcctcccgagagggtccactggatacccctgtgcaccctggcatcactaggagacattccactctgtaggtgagccctacttacccccaggcttgcatgggaacgtggaaatcattgccctgtgacatgaccccataccaaactttcctgtccctcaaatgcagcctccagaacccatgggcctgaatctgagtcccagacccaccaggactccctaaccaaccttagccaagatgccccacttcttgagcctccgtctctcatctggagat

SEQ ID NO: 1450 - DNA, 5022 bp, Mus musculus
  misc_feature (1)...(5022): n = A,T,C or G
nntggtttctgggggactctatagaaggcctttcgggatttctttctttggggggagggggcggtggtcccgacttggccagccgcctgctggaggggggcagcggggagcagggggatgcgaacccggctcccccaaccatgatgaagacggagcctcgggggcccgggggtcccctccggagcgcctccccgcaccgcagcgcctacgaagcgggcatccaggcactaaagcctcccgatgcacccgggcccgacgaggcacccaaggcggcccaccataagaaatatggctccaacgtccaccgcatcaaaagtatgttcctgcagatgggcaccaccgcggggccgccgggtgaggcaggcggaggcgcaggcatggccgaggccccacgggcgtccgatcgcggggtgcgcctgtccctgccgcgggccagcagcctgaacgagaacgtagaccacagtgccctgctcaagctgggcaccagtgtgtcggagcgcgtgagccgcttcgactccaagcccgcgccctcggcgcagcccgctcctccgccgcacccgccgtcccggctgcaggagacgcggaagctgttcgaacggagcgtccccgcggcctcgggtggcgacaaggaggccgtggcgcggcggctgctgaggcaggagcgcgccggcctgcaggaccggaagctggacgtcgtggtgcgctttaacggcagcaccgaggcgctggacaagctggatgctgacgccgtgtcgccgacggtcagccagctcagtgcggtcttcgagaaagccgactcgaggaccggccttcaccgtgcacccggcccccctcgggcagccggggcgccccaggtcaactcgaagctggtcactaagcggtcccgggtgttccagccaccgccgccgcctcccgccccgtcgggggatggcgcgaccgagaaggagcgtggccccggagggcagcagcccccacagcaccgggtggcccctgcccgacctccgcctaagccgcgggaggtgcgcaagatcaagccggtggaggttgaagaaagtggggagtctgaggccgagtcggctcccggggaagtgatccaggccgaggtgacggtccatgcagccttggagaatggcagcaccccggccaccacagccagccctgcacccgaggaacccaaggccgaagcggtccccgaggaggaggcggcggcgtcagtggcgacgctagagaggggggtggacaatggccgggccccggacatggcacctgaggaggtggatgaatccaagaaggaggacttctcggaagcggacttggtggatgtgagcgcctacagtggactcggggaggactctgggggcagtgccctggaggaggacgatgaagaagacgaagaggacggggagcccccctatgagccggagtcagggtgtgtggagattcccgggctctcagaggaagaggacccggccccgagccggaagatccatttcagcaccgcaccgatccaagtattcagcacctactccaacgaggactatgaccgacgcaatgaggatgtggatcccatggcagcctctgcggaatatgagctagagaagcgagtggagaggttggagctgtttcctgtggagctggagaaggactctgagggcttgggcatcagcatcattggcatgggcgccggagccgacatgggcctggagaagctgggcatcttcgtcaagactgtgactgagggtggtgcagcccatcgggatggcaggatccaagtgaacgacctgctggtggaggtggatgggacgagcctggtgggagtgacccagagctttgcagcctctgtacttaggaacaccaaaggccgagtgcggttcatgattggccgggagcggcctggagaacagagtgaagtggcccagctaattcagcagaccttggagcaggagcgatggcagcgggagatgatggagcagagatacgcccagtatggagaggatgatgaggagacaggagagtatgccaccgacgaagatgaagaactgagcccaacgttcccagggggtgaaatggccattgaggtgtttgaactagcagagaacgaggatgcgctgtcccccgtggagatggagcccgaaaagctggtgcacaagttcaaggagctccagatcaagcatgctgtcactgaagcggaaatccagcagctgaaacggaaggtgagggtgcgcgtgcctgtgtgctcggctgctcttttctcacagttgcagagtctggagcaggagaaagggcgctggcgggtagagaaggcccagctggagcagagcgtggaggagaataaggagcggatggagaagctagagggctactggggtgaggcccagagcctgtgccaggctgtggatgagcacctgcgggagacccaggcccagtatcaggccctggagcgcaagtacagcaaggccaagcgtctcatcaaggactaccagcaaaaggagatcgagttcctgaaaaaagagacagcccagcgtcgggtactggaagagtcggagctagccaggaaggaggaaatggacaaacttctggacaaggtagcgccctgggcagcctacagagtgagcagcatggaagctggaatccagtactcacttaatccatggtgtttggacctggacttggctgtaccagagaccaccagactggacagcagcttacacaaagccagggctcaactgctggccaagggccggagacaccggccttcccgttccaggctacgagacagtgccagctctgccgaggacggtgaaggctctgatgggcccggaggcaagcggctcgccaccacgctctgcaccctcctccgacagctcccccagcttcgtgcgtcgttaccctcgagcagagccgcacagcgaagatgacagccgggatgccagcccccctgagcctgccagccccaccatcggcttggacaagaagactcgcaggaaattcctggacctgggggtcactctccgccgagcatccaccagcaggagcaggaaggagaagggtagcaaccgcctgtccatgggcagcagggagtctgtagaaggttctggaaggacaggaagctccccgttcctgcccttttcctggttcacggacagcggcaagggctctgcttcctcggggagtaccacctccccgacctgttcccccaaacacgagggcttcagccccaagaagtcagcttcccaggaatctaccctgagcgatgactccacaccccccagcagcagccccaagatccccggtggtcctcgacaggagaccaagtgttcctatccctaccacacgctgtcccagtcttcggatgagttcctggatgagtccctccctgccgtacaacactggaccagccagcaggtgggccagtggctacacagcctcaacctggagcagtatgctgccgagtttgctgcccggcaggtggatgggccgcagctcctgcagctggacggaagcaaactgaagagcctggggctcagcaattcgcatgaccgagcactggtgaagcggaagttgaaggagctggcagcggctgctgagaaggaacggaaggcgcaggagaagaccgcaaagcagcgggagaagctgcggcgccgcgagaacgatgccaagaagagctagggatggctggcggggctggcaccccggcgcacttgcagccacctacatgggcctcaccagggaggcagggtccaggcaccaggctctcggagcacgcggcccccctctcaccctgtttggactgagtcctctggagggagaccccaggggggagggcccagtaataaacccaatttcgaggacttgtttggcgcagacttccagggggaagcaggtggcagatgaagagggcagaggccaggaatgcagcaaacgcggagcccagaggagcctggttcaggtggaacctccgccctctgactagagtggtccgagcaggaagaaatctagcaggagaggccctaccatggccaggattcctaggtttagagagtagcctgggcaacccgactggagacaggagacagctgtgtctcctcaccttttgaaggtggctgtgtggtgggagaacagatctccccagagaggccagtgggcagtgccagtagcactcagggtggattcccagacacctcctcagaggagagagagagcagggcaggataagctggcctctgtaaggaaggcagagggggagaagggagctctcactcactctctctctcttcccctccctcacctgcaggttccagcacacaggtctgctcctctcccattgagtccctttcgcagagctaaaatccacttcttcggagagtacttgagccttcgagggcaggaaaaattgagagctgttggggacacgggtcactcccccaactagtgtctagatggtgaagaggcacaccctaagtgtggcctgcatgctgccagattgaaagggtccatcagcttccctggtgccctgggtgtgtcaaggcctcagaggcctggggcggatggacagacactgctggcttaggtttgctaggctacagagggggactgggccagccccgcgtgggactggcacatgtcctttgtagggcgtgttcagagatagagggtccaggtgcaatgctgacccagcttcttgggtgctggtcagttactactaggcccaggttttagatgacaaacccccacccctcccagtttcctggagaggtgaacaggacctgcatgttaactccctctctcctgcctgggaaagtggctgaaggccagggccctatgtttgtgctcagtcaccttcactggaagagggggcctcatagggaaaactaaggtatcggggcactggcacttcctagactgggtggggagggtggaggctctactgtccccgaagccgtgaagagccaagtgtgcccacctgcatgtgaagggggaagatggctatcaacttctttcaataaatacttaccacacacc

SEQ ID NO: 1451 - protein, 965 aa, Mus musculus
WFLGDSIEGLSGFLSLGGGGGGPDLASRLLEGGSGEQGDANPAPPTMMKTEPRGPGGPLRSDHRSAYEAGIQALKPPDAPGPDEAPKAAHHKKYGSNVHRIKSMFLQMGTTAGPPGEAGGGAGMAEAPRASDRGVRLSLPRASSLNENVDHSALLKLGTSVSVSRFDSKPAPSAQPAPPPHPPSRLQETRKLFERSVPAASGGDKEAVARRLLRQERAGLQDRKLDVVVRFNGSTEALDKLDADAVSPTVSQLSAVFEKADSRTGLHRAPGPPRAAGAPQVNSKLVTKRSRVFQPPPPPPAPSGDGATEKERGPGGQQPPQHRVAPARPPPKPREVRKIKPVEVEESGESEAESAPGEVIQAEVTVHAALENGSTPATTDAPEEPKAEAVPEEEAAASVATLERGVDNGRAPDMAPEEVDESKKEDFSEADLVDVSAYSGLGEDSGGSALEEDDEEDEEDGEPPYEPESGCVEIPGLSEEEDPAPSRKIHFSTAPIQVFSTYSNEDYDRRNEDVDPMAASAEYELEKRVERLELFPVELEKDSEGLGISIIGMGAGADMGLEKLGIFVKTVTEGGAAHRDGRIQVNDLLVEVDGTSLVGVTQSFAASVLRNTKGRVRFMIGRERPGEQSEVAQLIQQTLEQERWQREMMEQRYAQYGEDDEETGEYATDEDEELSPTFPGGEMAIEVFELAENEDALSPVEMEPEKLVHKFKELQIKHAVTEAEIQQLKRKVRVRVPVCSAALFSQLQSLEQEKGRWRVEKAQLEQSVEENKERMEKLEGYWGEAQSLCQAVDEHLRETQAQYQALERKYSKAKRLIKDYQQKEIEFLKKETAQRRVLEESELARKEEMDKLLDKVAPWAAYRVSSMEAGIQYSLNPWCLDLDLAVPETTRLDSSLHKARAQLLAKGRRHRPSRSRLRDSASSAEDGEGSDGPGGKRLATTLCTLLRQLPQLRASLPSSRAAQRR

SEQ ID NO: 1452 - DNA, 787 bp, Mus musculus
cgtttgcagacctggacttggctgtaccagagaccaccagactggacagcagcttacacaaagccagggctcaactgctggccaagggccggagacaccggccttcccgttccaggctacgagacagtgccagctctgccgaggacggtgaaggctctgatgggcccggaggcaaggtgaccgacggctgcggtagcccgctgcaccggctgcgctcgcctctacattcgggtccaggctccccagccagtggatctttctgcctggagcccccgggcttgaggcgcagtctggatgaggacgaaccgccgccctcgccactcgctcggtaccggcccctgcacaacgccgcctcgcatgagggcctggccgccacctccggctcgccaccacgctctgcaccctcctccgacagctcccccagcttcgtgcgtcgttaccctcgagcagagccgcacagcgaagatgacagccgggatgccagcccccctgagcctgccagccccaccatcggcttggacaagaagactcgcaggaaattcctggacctgggggtcactctccgccgagcatccaccagcaggagcaggaaggagaagggtagcaaccgcctgtccatgggcagcagggagtctgtagaaggttctggaaggacaggaagctccccgttcctgcccttttcctggttcacggacagcggcaagggctctgcttcctcggggagtaccacctccccgacctgttcccccaaacacgagggcttcagccccaagaagtcagcttccca

SEQ ID NO: 1453 - protein, 256 aa, Mus musculus
FADLDLAVPETTRLDSSLHKARAQLLAKGRRHRPSRSRLRDSASSAEDGEGSDGPGGKVTDGCGSPLHRLRSPLHSGPGSPASGSFCLEPPGLRRSLDEDEPPPSPLARYRPLHNAASHEGLAATSGSPPRSAPSSDSSPSFVRRYPRAEPHSEDDSRDDPEPDTIGLDKKTRRKFLDLGVTLRRASTSRSRKEKGSNRLSMGSRESVEGSGRTGSSPFLPFSWFTDSGKGSASSGSTTSPTCSPKHEGFSPKKSB

SEQ ID NO: 1454 - DNA, 5121 bp, Mus musculus
  misc_feature (1)...(5121): n = A,T,C or G
nntggtttctgggggactctatagaaggcctttcgggatttctttctttggggggagggggcggtggtcccgacttggccagccgcctgctggaggggggcagcggggagcagggggatgcgaacccggctcccccaaccatgatgaagacggagcctcgggggcccgggggtcccctccggagcgcctccccgcaccgcagcgcctacgaagcgggcatccaggcactaaagcctcccgatgcacccgggcccgacgaggcacccaaggcggcccaccataagaaatatggctccaacgtccaccgcatcaaaagtatgttcctgcagatgggcaccaccgcggggccgccgggtgaggcaggcggaggcgcaggcatggccgaggccccacgggcgtccgatcgcggggtgcgcctgtccctgccgcgggccagcagcctgaacgagaacgtagaccacagtgccctgctcaagctgggcaccagtgtgtcggagcgcgtgagccgcttcgactccaagcccgcgccctcggcgcagcccgctcctccgccgcacccgccgtcccggctgcaggagacgcggaagctgttcgaacggagcgtccccgcggcctcgggtggcgacaaggaggccgtggcgcggcggctgctgaggcaggagcgcgccggcctgcaggaccggaagctggacgtcgtggtgcgctttaacggcagcaccgaggcgctggacaagctggatgctgacgccgtgtcgccgacggtcagccagctcagtgcggtcttcgagaaagccgactcgaggaccggccttcaccgtgcacccggcccccctcgggcagccggggcgccccaggtcaactcgaagctggtcactaagcggtcccgggtgttccagccaccgccgccgcctcccgccccgtcgggggatggcgcgaccgagaaggagcgtggccccggagggcagcagcccccacagcaccgggtggcccctgcccgacctccgcctaagccgcgggaggtgcgcaagatcaagccggtggaggttgaagaaagtggggagtctgaggccgagtcggctcccggggaagtgatccaggccgaggtgacggtccatgcagccttggagaatggcagcaccccggccaccacagccagccctgcacccgaggaacccaaggccgaagcggtccccgaggaggaggcggcggcgtcagtggcgacgctagagaggggggtggacaatggccgggccccggacatggcacctgaggaggtggatgaatccaagaaggaggacttctcggaagcggacttggtggatgtgagcgcctacagtggactcggggaggactctgggggcagtgccctggaggaggacgatgaagaagacgaagaggacggggagcccccctatgagccggagtcagggtgtgtggagattcccgggctctcagaggaagaggacccggccccgagccggaagatccatttcagcaccgcaccgatccaagtattcagcacctactccaacgaggactatgaccgacgcaatgaggatgtggatcccatggcagcctctgcggaatatgagctagagaagcgagtggagaggttggagctgtttcctgtggagctggagaaggactctgagggcttgggcatcagcatcattggcatgggcgccggagccgacatgggcctggagaagctgggcatcttcgtcaagactgtgactgagggtggtgcagcccatcgggatggcaggatccaagtgaacgacctgctggtggaggtggatgggacgagcctggtgggagtgacccagagctttgcagcctctgtacttaggaacaccaaaggccgagtgcggttcatgattggccgggagcggcctggagaacagagtgaagtggcccagctaattcagcagaccttggagcaggagcgatggcagcgggagatgatggagcagagatacgcccagtatggagaggatgatgaggagacaggagagtatgccaccgacgaagatgaagaactgagcccaacgttcccagggggtgaaatggccattgaggtgtttgaactagcagagaacgaggatgcgctgtcccccgtggagatggagcccgaaaagctggtgcacaagttcaaggagctccagatcaagcatgctgtcactgaagcggaaatccagcagctgaaacggaaggtgagggtgcgcgtgcctgtgtgctcggctgctcttttctcacagttgcagagtctggagcaggagaaagggcgctggcgggtagagaaggcccagctggagcagagcgtggaggagaataaggagcggatggagaagctagagggctactggggtgaggcccagagcctgtgccaggctgtggatgagcacctgcgggagacccaggcccagtatcaggccctggagcgcaagtacagcaaggccaagcgtctcatcaaggactaccagcaaaaggagatcgagttcctgaaaaaagagacagcccagcgtcgggtactggaagagtcggagctagccaggaaggaggaaatggacaaacttctggacaaggtgccaaacagccataggcgtcctcctggaactgccctgaggccactctgggcttctggtttccttggtctagcccaggaatgccaggagggagggagacgtgcccccgactccccggaaagagctggctgtcactgtgcccggcccctgcacttcacccaggcagatggaggggacctggacttggctgtaccagagaccaccagactggacagcagcttacacaaagccagggctcaactgctggccaagggccggagacaccggccttcccgttccaggctacgagacagtgccagctctgccgaggacggtgaaggctctgatgggcccggaggcaagcggctcgccaccacgctctgcaccctcctccgacagctcccccagcttcgtgcgtcgttaccctcgagcagagccgcacagcgaagatgacagccgggatgccagcccccctgagcctgccagccccaccatcggcttggacaagaagactcgcaggaaattcctggacctgggggtcactctccgccgagcatccaccagcaggagcaggaaggagaagggtagcaaccgcctgtccatgggcagcagggagtctgtagaaggttctggaaggacaggaagctccccgttcctgcccttttcctggttcacggacagcggcaagggctctgcttcctcggggagtaccacctccccgacctgttcccccaaacacgagggcttcagccccaagaagtcagcttcccaggaatctaccctgagcgatgactccacaccccccagcagcagccccaagatccccggtggtcctcgacaggagaccaagtgttcctatccctaccacacgctgtcccagtcttcggatgagttcctggatgagtccctccctgccgtacaacactggaccagccagcaggtgggccagtggctacacagcctcaacctggagcagtatgctgccgagtttgctgcccggcaggtggatgggccgcagctcctgcagctggacggaagcaaactgaagagcctggggctcagcaattcgcatgaccgagcactggtgaagcggaagttgaaggagctggcagcggctgctgagaaggaacggaaggcgcaggagaagaccgcaaagcagcgggagaagctgcggcgccgcgagaacgatgccaagaagagctagggatggctggcggggctggcaccccggcgcacttgcagccacctacatgggcctcaccagggaggcagggtccaggcaccaggctctcggagcacgcggcccccctctcaccctgtttggactgagtcctctggagggagaccccaggggggagggcccagtaataaacccaatttcgaggacttgtttggcgcagacttccagggggaagcaggtggcagatgaagagggcagaggccaggaatgcagcaaacgcggagcccagaggagcctggttcaggtggaacctccgccctctgactagagtggtccgagcaggaagaaatctagcaggagaggccctaccatggccaggattcctaggtttagagagtagcctgggcaacccgactggagacaggagacagctgtgtctcctcaccttttgaaggtggctgtgtggtgggagaacagatctccccagagaggccagtgggcagtgccagtagcactcagggtggattcccagacacctcctcagaggagagagagagcagggcaggataagctggcctctgtaaggaaggcagagggggagaagggagctctcactcactctctctctcttcccctccctcacctgcaggttccagcacacaggtctgctcctctcccattgagtccctttcgcagagctaaaatccacttcttcggagagtacttgagccttcgagggcaggaaaaattgagagctgttggggacacgggtcactcccccaactagtgtctagatggtgaagaggcacaccctaagtgtggcctgcatgctgccagattgaaagggtccatcagcttccctggtgccctgggtgtgtcaaggcctcagaggcctggggcggatggacagacactgctggcttaggtttgctaggctacagagggggactgggccagccccgcgtgggactggcacatgtcctttgtagggcgtgttcagagatagagggtccaggtgcaatgctgacccagcttcttgggtgctggtcagttactactaggcccaggttttagatgacaaacccccacccctcccagtttcctggagaggtgaacaggacctgcatgttaactccctctctcctgcctgggaaagtggctgaaggccagggccctatgtttgtgctcagtcaccttcactggaagagggggcctcatagggaaaactaaggtatcggggcactggcacttcctagactgggtggggagggtggaggctctactgtccccgaagccgtgaagagccaagtgtgcccacctgcatgtgaagggggaagatggctatcaacttctttcaataaatacttaccacacacc

SEQ ID NO: 1455 - protein, 998 aa, Mus musculus
WFLGDSIEGLSGFLSLGGGGGGPDLASRLLEGGSGEQGDANPAPPTMMKTEPRGPGGPLRSDHRSAYEAGIQALKPPDAPGPDEAPKAAHHKKYGSNVHRIKSMFLQMGTTAGPPGEAGGGAGMAEAPRASDRGVRLSLPRASSLNENVDHSALLKLGTSVSVSRFDSKPAPSAQPAPPPHPPSRLQETRKLFERSVPAASGGDKEAVARRLLRQERAGLQDRKLDVVVRFNGSTEALDKLDADAVSPTVSQLSAVFEKADSRTGLHRAPGPPRAAGAPQVNSKLVTKRSRVFQPPPPPPAPSGDGATEKERGPGGQQPPQHRVAPARPPPKPREVRKIKPVEVEESGESEAESAPGEVIQAEVTVHAALENGSTPATTDAPEEPKAEAVPEEEAAASVATLERGVDNGRAPDMAPEEVDESKKEDFSEADLVDVSAYSGLGEDSGGSALEEDDEEDEEDGEPPYEPESGCVEIPGLSEEEDPAPSRKIHFSTAPIQVFSTYSNEDYDRRNEDVDPMAASAEYELEKRVERLELFPVELEKDSEGLGISIIGMGAGADMGLEKLGIFVKTVTEGGAAHRDGRIQVNDLLVEVDGTSLVGVTQSFAASVLRNTKGRVRFMIGRERPGEQSEVAQLIQQTLEQERWQREMMEQRYAQYGEDDEETGEYATDEDEELSPTFPGGEMAIEVFELAENEDALSPVEMEPEKLVHKFKELQIKHAVTEAEIQQLKRKVRVRVPVCSAALFSQLQSLEQEKGRWRVEKAQLEQSVEENKERMEKLEGYWGEAQSLCQAVDEHLRETQAQYQALERKYSKAKRLIKDYQQKEIEFLKKETAQRRVLEESELARKEEMDKLLDKVPNSHRRPPGTALRPLWASGFLGLAQECQEGGRRAPDSPERAGCHCARPLHFTQADGGDLDLAVPETTRLDSSLHKARAQLLAKGRRHRPSRSRLRDSASSAEDGEGSDGPGGKRLATTLCTLLRQLPQLRASLPSSRAAQRR

SEQ ID NO: 1456 - DNA, 36786 bp, Homo sapiens
  misc_feature (1)...(36786): n = A,T,C or G
ttcacaccatccataaatatgaattccagatggattaaagacctaaaagtgaaaaacaaaactttaaaataattaggagaaaatgtaggagacctaagggtaggaaagcatttcttagacaagagacacactcaaaaaagatcagccgatttttattacattaccccccaaaagccctctgctatgaaaatgatattacaaagaaagttaagagacaaggagcagcctaggtggcaatggtgacagcatacacaacagataaagggttagcattcagaatatacagacctcctaggaatctacaaaattagctgggtgtggtggtgcgcacctgtaatcccagctacttgggaggctgaggcaggagaattgcttgaacctgggaggcagatgttgcggtgagccaagattgcgccatcccactctagcctgggcaacaagagcgaaactccatctgaaaaaaaaaaaaaaaaacctcctaggaattaggaatcaatatggaaaagacagaacttttattttatttttatttcttcttttttttttttttttgaaacagggtctcgctctgtcgctcaggctggaatgcagtgacacaacctcggctcactgcaacctctgcccctccaggctcaagtgatctttccacatcagcctcccaagtagctgtgactacaggcacatgccactatgcccggctaatatatatataaaacatatatatatgacatatatacataacatatatataacatatatatctatatatatcacatatatataacatatatatatatttggtagagatggggtctcaccatgttgctcagccttgtctgaaactcctgggctcaagcagtcttcccaccttggcctcccaaaatgccaagattacaggtgtgagccaccaaacctggcctatttttttctttcaaggtactcatcaagtagtaaggacagacattttttgtgccactccaaatagcatcccttccttcttccttgataatcagaaccccatttctgattcaggtgtttgggctttgtgggaggctcggccttcctcaaccccatcaggtgaatgatgattggtctaaatatagcatgctaatttagttcctctggtcaatgattggtttaggtgtggacgtttatgcaattctggaaggtctcctggtggggacccctgggaaagagactaataagaaagcatccagtttcttcggtctctgacgttgttgtctgcacaagagagttaaggcagccatcttgggaccatgagggagccagtctaagaggcaaatcaacacaatgagagggtgttggaaaaagacaaaaagaacctggtccttgatgtcacagccaggcctctgaattaaccacccccaggacttcttgttacgtgagctaataaacgttcctttttgcttaaaccccttctagttgggctttctgttgtaacttgcaccgaaaactacaataggatagcaaaggatatgaacataagtgatttgcctagaggaaacccacatggtcaatgagaataagatgctcagcctcataggcagggaatgcagcttcaaatgagatgccacttcatgcctatcagattggcaaacataagtctaacaagagcaaaagttggcaaggatgtggtaaaacaggatgtcttgtacaaacgctggtggtgagaggatcaattggttcagacgctgtagagagcagtttggcagtactagtcaacttcaaagtgtgcctgcccgacaatcctagctttctaagtatatgccctaataatgggttcagagaaaagtccaagcatgttcattgaagccctgtttatataacagcaaaacaggcccggtgcaatggctcatgcctgtaatcccagcactttgggaagctgaggcaggcagatcacttgagctcaggagtttgagaccagtctggccaacatggtgaaaccctgtctctgctaaaaatacaaaaattagccaggcgcagtggcatgtgcctgtaatccctgctactcgggaggctgaggtaggagaatcgcttgaacctgggaggcggaggttgcagtgagccaagattgtgccattgtactccagcctgagcgacagagcgagactccatctcaaaaataaataaatagcaataataacaaaacatagagacaacctaaacacccaattgataaatatattgtggcttattcttctgataaaataataaacagaagttaaaatgaacaaatcaaatgaacaaatgtggctacattgtgaaaaaaacatgttgactggaaaaatgatccacatagtatgatggccattgcataattttttttttttttcagggtcgtgctctgtcacccaggctggagtgcagaagcacagtcatagctcactgcagcctggaactcctgggctcaagtgattctcccacttcagtctcctgagtagtcaggactataggtgcaccaccacatctggctaattttttatttttttgtagagacagggtcttgccgtgttgcccaggctgggcttgaaatcctggcctcaagtgatcctcctgcctcagcctcccaaagtgctgggattataggcatgagccactgtacctgcctttgttacatacatttttaaaatacataattctagaccaggcacagtggctcatgcctgtaatcccagcactctgggaggctgaggcgggcagattacctgaggtcaggagttcgagaccagcctggccaacatggtaaaacccccgcctctactaaaaatacaaaaattagcctggcatggtggtgcgggcctgtaatactagctactcaggaggctgaggcagannnnnnnnnnnnnnnnnnnngagaaacgaggaagctgcagaagaaaagttacaagttaccagcggttggttcatgaagtttaaggaaataagctgtctccaaaacataaaagtacaaggtgaagcagcaactgctaatggagaagctgcagcaagttattcagatctagctaagatcactgatgaaggtggctacactaaacaacagactttctttttctttctttttttttttttgagatgaagtctcgctctgtcgccaggcggaagtgcagtggtgcagtggcatgatctcggctcactgcaacctccgcctcctgggttcaagcgattctcctgcctcagcctcccgagtagctgggactacaggtgcacgccactacacccagctaatttttgtatttttagtagaggtggggtttcaccatgttggccaggatggtcttgatcttttgacctcgtgatctgcccgcctaggcctcccaaagtgctgggattacaggcatgagccactgggtaccctgcctttgttacatacatttttaaaatacataattctagaccaggcacagtggctcatgcctgtaatcccagcactctgggaggctgaggcgggcagattacctgaggtcaggagttcgagaccagcctggccaacatggtaaaacccccgcctctactaaaaatacaaaaattagcctggcatggtggtgcgggcctgtaatactagctactcaggaggctgaggcagaagaattgcttgaacctgggaggcagaagaggggaatggggacttatatgggtatggagttttagctctggaagatgaaagtaagttctagagatagatggtggtgatggctccacaacaaggtgattgtacttaatgccagtgacctgtacacactgaatggtgaattttattttatttatttatttgtttatttttgagacagagtctcgctctgtcgcccagactggagtgcagtggcgcgatctcagctcactgcaagctccacctcccaggttcaagccattctcctgcctcagcctcccgagtagctgggactacaggcgcccgccaccatgcccggctaatttttcttgtatttttagtagagatggggtttcaccgtgtcagccaggatggtcttgatctcctgacctcgtgatctgcccgcctcggcctcccaaagtgctgggattacagacgtgagccactgcgcctggccaaaatggtgaattttatatctctagtctgctacaattaaaatatagtaatgcaaaaattatggtctagaaaagctgtattccaaatgtgtgagtgttgggggaggtggacaatggaactggggagaaagaaaagggggctcaaatatatatatatacttttttttgagacggagttttgctcttgttgcccaggctgtagtgcaatggcacgatctcggctcactgcaagctccgcctgccgggttctcgccattctcctgcctcagcctcccgagtagctgggactacaggcacctgccaccatgcccagctaatttttttgtgtatttttagtagagacagggtttcactgttagccaggatggtctcgatctcctgacctcgtgatccgccctcctcggccttccaaagtgctgggattatggcactgggtggtgtgagtcaccgggccggccaaatattctcttttatatgtaaaaacccaaagcaaaaatgacacattgctagcatttgtaaattctgtcacatgattctttgaaggcctcttactgttaaagaaacttttcaaagtaaaagtaaaaaaacaattaatgaacatttttgtaggaaaaaagaggtctctgaagtagaactgccctgaagtgcaggatttctcaccccacacctcaccccaaagccacctgcgtgctgggcactgagcgtgggagacctgagagctggtgttctggaggctgtacctgcgccaggcagagcctggcgggctagtggggatggagatggcgggatgctgtttcctctgacccagggcagatgaggcaaaggctggcaggaaaaggtgtctccgagagccagtctccttctcaggcacccactgcacaagatccggagggcagatgaaacataggaaccatcgaaacacagaaatgtgtattattagcagtgagagcaggcagtagagttttttgaatctgctgatgacaaaatatattgcctaatctttctgattattttttttttctttgacctccctgcatatctctggagctcccacagctacgggctgtctgccttgcaaaatacatatttacaggccctctaagcccagctaaatataggctttcttttaaagcaactgatgatttggagaaatctttcctctgtccaaccccttcccccgccccccaacacacacacacaccctgactcctcctaccaagtctccctccctagtctccaagatgtatctgaactttccaagagccactggagcaagtgtggagagtgatagaaagaaactgggtacagcagagggaaccagcagcaaggcagtctcctagctgtgagaggaccctaagggacccctctccctgcagggacaatgaggggcttgaggcacccacaggcaggagtgaaaaaccctttgggaagtagagaagagaggtcatcccaagaatgacccccaaagatttggagaagctgtaagcaaggggtgtttatatttcagaatttcacatattgaaccttaaagaaaatgagagccccaaagtcctgtgaagacacacagagagatgcaaacaccgagtttcattctcagccacacctgcccacatgtgcatgcaggcacacacccccacatgtgcttggataccctgcaatcagtaacagccaacactctgagcccccttttagtgccttatgcattgaggacccatttattcctcacaaaaactctatgaagttggtatattatcttcatcttatagatgaaggaatttgttgaagccccttagctggggagtgggaggttggagattctaacagagatggcctggcttcaaggcctgtgctgcatgcacaaaagtgagggacacctagggttatctatgctcaggaaacactcagacactcaagctaagctttttgaggaaacaggctttgggaggggacacgactagcccacggtcatccagcaaatgagtgcagctaggactcaattcaggcctcatgaaccctagcctggtctgtttcctttaaaactaggtatgtcacttctcagctttcgtcattctccctgtgaagaggtcagccaagggccactaaaggcccctccaacactgacatcctggatttgaggtgtacacacacctttccagcatacctttccagcatcctataaccagcccaaatccctggcagaggtcaactcttgaaggagagcaactgggtggggaccactggctcaccacaaaaggatccaagtgcagggtctgggccagcctctgcttagatgaccgtggccaaggaaaaaccgcttttagaagctgagtctcaaggccccagggctggaaagagaagccagccttggcacccagcccgggcctgcgcccagggcgctgagggctcgggacttatcgctcgtcaggcctctccctgccttcatcactatctttgcagttacacctggtgtttaaaactagcaagccttggggaagagtcctaacagagcatcttcccaagggccctaagcagatttgggggggtgtgggaaagctgtggcaggggggcggttaccaggaggagagttgggggtgaattatctctgcctatcgcagcctctggcctttttagcacaggctgggaaaggcgtctcctcccccacaccctatcttctgtgtccgagccactctcgtcctttctgggccttctttcatcctcccagggcacagaggaggataagtgacttgtccaaggtcacacagccagtaagcagtgaagccaagatttgaaccctagcagcctggctcctaggtcaaccactctatgccaaggcaaaggtaaggaaggaacttccatccaaagaccactgggcaacttggccatcaaagtctcttccatgaagacaaaggaaagagaaagggtggttaaattatcctggagtgcttcctcactggaggatgtaggtgaagatgacagcccaatgaatgaaaattctatttaaagccttcagtttggatggtaaccctcccaaaccctccttgttcctatcaggtgcgattactgctccagacaggcagagaagggatggagggaatgagaccccattcttcacccatctcacaggccagccggcttggtgcctgacaccagagaacaagtgatggtgaagcacttaccgctccataaaagcgtctttgggaattctggccagggtgttgctctgctaaccaggagcccatgaaataataatcccactgattagcctcagtcccccaagctctggctagctccaccctcttgaagcccaaaccccctagaagggtctgttaaaggggtttgtccggagattcataatcctttggacaagggagacccaagagcacccctgtaattccagtttgctctaagctgctaccggaaatgctgggagtccgagggtctctgggcctggtagctggttctcagctccttctcccaccctcagaaactgggggcttccccacctggccagacgcgtgggcacagaccccttgggctgggaccagttaagatgatctaccaccaagggtgtgggagattctgggcagaacacaggggcctgcgccctcctccaatccacacaagagcttctgagtacattgtacaaacttccaaaccccaactgggtgaggtttctgtcttctccggacttctatattggggttggggggcctgtggggaggggttttcaagacccaatcttgagtttggaaatctaagtcccaaagcttgctcctgacagaggccttctaagaagggttaggagacagacttcttcaccctgcaccatcccaaagtgcaaaactggggaggggtaagtttcctgggcaactgggcaaagatgcaggtggcatttggaaagtgtgaggtctgggttcacttccggctctagctcacaacctagatcttccctcttccttagcaccagcctcaggatcagtcctgcggttcctggcccctcccgatcccaatatccagggttcccaggcggcttccccacaccccatcccccacgctgtactctaagctcttttgcacatggtaacgcgttaatatcccacaaaacccacacacacccctgcagtggagtggtaggagggctccctttgccagcccttccaggccaggggggagagagtgggagattaggaaaaggaggaagaggatggaggggaagagggcgggggaggaggcagaggccgcagaaaggcctgagatgcaggaagcagctgggagtggggggaggctttgtgcctgagttgttctctgggtcctagggcccattgtgttcaccagtttctgggatgtgtggaatgaaccagctcacctggacctgtccagagggcggactctcacacccagggcccaggcagcgccagcaccctagctgtgtatgcggggggtgcagagggcatcaaacagctttctgggttgccaggacaggggatgtgtaagtcactgtcaccctccccacccccccaccccaaccggaacacagtggccaggatcctttaaatcagagacccaagttagagctctcactggcgaaactttggccccaggcctctcgaattcctgctcccaaacccttccttccggtttgagaggcaggagtgccagggtaggggcctgaagacgggtgcacagcagacaggcgacaggacatcctttccagacttctaaacggcagttttggtgatcccctgctacttggatgacggggttcacctcctttcttcaccacccctcccccaccatcgaaaggtcaccagcgctggaccaaggtttcacacctccaagggggccaaagattgcctgtagtgaagtgttaaaatgcagattcctgggttcagcctcggagattctccttcacaaggttcgagagagatcccagaaatctgcatttttaccaagtgcccagcgattctgatgctaaaggcttgaagcacaccgaagagctagctccgaggacactgaagaatgaacctctgcccctccctacaaaccccctcccctcacactgagaccatcgtggatgtactgcctccccccaatatttcatggaggtgcggttctgtgggttgtgaccgcagtcagaagttgtgatggaagcaggttgaagagtgctggccaacgtccgggggcagcggaaggctctccgcgagggctggggaggggaggggatccgttcgggtggaggggaaggggagggctcacaggctccggccccggaaatccgatccctttaggacccagaggtgccagtcccccagcggcggctgcgagaagggcagccgctcggtctccggcagccgccgctcgggcaaagccagagaaagaccgaggctcggggcacgggggggagggagggagggagggaggcgcggcggcggagcggcccgggccggcggagcagccatgggcgttggggtgccgggccccccgagagccgaggcctccggccggactgggggacgcccgggctgccagccccgctgacaccgtctcggacgatgtgagccggcgacaccgcggctgcttcgcgggcagggcgcgcgctcccaccggccccagacgccgctttgctaatttgggtgggggcgaccgtaccaggccgctcgggcttttgaagcggggctggctgtcttcggcagcttgattgggggaggcgacccacacacagggcgcttggagattttttttttttcatttttttttttaaagcgggattaactgtttttggcagcttggttttggggggaccctaaaaaaggccttcggggtttcttttatcggggggagggggcggtggtcccgacttggccagccgcctgttgaagcgggggagcggggagcaggggcatgcgaacccggctccccccaccatgatgaagacggagccacgggggcccgggggtcccctccggagcgcctccccgcaccgcagcgcctacgaggcgggcatccaggcgctgaagccgcccgacgcgcccgggcccgacgaggcacccaagggggcccaccacaagaaatatggctccaacgtccaccgcatcaaaagtatgttcctgcagatgggcacgacggcggggccctcgggcgaggcgggcggcggcgcgggcctggccgaggccccacgggcgtccgagcgcggcgtgcgcctgtcgctgccgcgggccagcagcctgaacgagaacgtggaccacagcgccctgctgaagctgggcaccagcgtgtcggagcgcgtgagccgcttcgactccaagcccgcgccctccgcgcagcctgcgccgccgccgcacccgccgtcccggctgcaggagacgcggaagctgttcgaacggagcgccccagcggccgcaggcggcgacaaggaggccgcggcgcggcggctgctgaggcaggagcgcgccggcctgcaggaccggaagctggacgtcgtggtgcgcttcaacggcagcaccgaggcgctggacaagctggacgctgacgccgtgtcccccacggtcagccagctcagcgccgtcttcgagaaggccgactcgaggaccggcctccaccgcgggcccgggctccccagggccgcaggggttccccaggtcaactcgaagctggtcagcaagcggtcccgggtgttccagcccccgccgccgccgccgcccgccccgtcgggggatgccccggccgagaaagagcgatgccccgcagggcagcagcccccgcagcaccgagtggcccctgcccggccgccccccaagccccgggaggtgcgcaagattaagccggtggaggtggaggagagcggggagtcggaggccgagtcggcgcccggggaggtgatccaggccgaggttacggtccacgcggccctggagaatggcagcaccgtggcaactgcagccagccccgcgcccgaggagccaaaggcccaagcggccccggagaaggaggcggcggcggtagcgccgccagagaggggggtgggcaatggccgggccccggacgtggcccctgaggaggtagatgaatccaagaaggaggacttctcggaggcggacttggtggacgtgagcgcctacagtgggctcggggaggactctgcgggcagtgccctggaggaggacgacgaagacgacgaggaggatggggagcccccctacgagcccgagtcggggtgcgtggagatcccggggctgtcggaggaggaggacccagccccgagccggaagatccatttcagcacggcgcccatccaagtaagtgagcccccccgccctgcccccgcgccgcccctgccacgtgcacgcggccgcccccggctcgccagccagccagccgggtttggcaggctgagtcagcccctgccacccagcccccttcccagaagttcccaccctcaggggggcgtgggggagttccagctgtttgtcagagagggattttcaggtgtgcgaggggggtggcctgccccgacctgccctcaggttcctccgcctgctgccccgccccgccgctccgcggaacccgccctgccccacgcgggtcctgggacacctgctttcccttcctcacccggacattccttcctccagaggctgccagaggctggggttgggtagtgtgaaggggtgtgtgtgtcttcaggagagacatttgcccttcactgggtagagagggggccggggtgctttccccctgtatgggagctggatgaggtgagaaaggggaaagccaggaacttctcaaaacgaagctgcaggggaccgcaggcagcccttcctctattctgtttgtacccccaccccaactttgcagaagtgaaagagggaagcagatcgtgagggtgagctggtctgtggccatgtgactggctggcgccgtgttccctgggggtccctgcaggccagctgcccggtcctccttgcacagggaggggcactttgtgtggtccttgatggggagaggccttctgcaggcatggaggaggaggaggtggggctgggatccccctgggtgcctggcagtagtgggcatgcctttactcttggctgctcaataggacagactcccatggccttggcaggccccaagtgttcttgccacattctctgggagccctgaaagagggatgggagctgccccttttgggggtctcatccccacggccactattggtggttggtttgtgggttgtgccagagctttgagatcctcagaacagccctgatggggagggaacatcccctggggggaatcaaaaaccccaggccacccctccccccacttcccaccaccctccactcttggctagcacattcagcctgcagggttcttcctcaccgccccaggctcagctgcacccggccccaggtccgccccatggaagtgtccaggtccctggactctccttggcctggaccctgccctgcctttacccttccctagccaaagcaccatctgtttgcttgtcgtttccataactactcctggactctgaagcttcccaactttcctctcactcgcccagaatgtcagcctctgcccctctcccacctcccaccccagcaagaggcctgaaaggttaaaagtgagtggctctcaggccagcctctcccctgggctgggacctgcggggtcctctcccaacccctttcccctcctgaaggcagtggggttctgaagggaatgggggactgtagtgtttcttgggactctgaagcagagtttggatccccccaccccacccccactaattttgcgagaagtccgattccctcagagttggagtttggtctgggcctctgactgtctatatttgacgccttaccctgatttttcagtaaaaaatagcacatgatttggagcagtgcttcccggctccctggtgactttggagctggcccgccctgtgtgagagccagcgtgtgtggcgggcccagtgtggctggctttcagcctcactggggatttcctcctccccaccctggcacaggggccccactttttcttcttcctgcccctgccttgatgccaagtccagggtcccggtccccatggatgacccaattgttgcccttctggaggtggaggcctctgctgagggcagagaacccaattccagcttggcctcagggaggtgggacctcccctagggccctctgctagaccggcatatcatggtgggcagcccgaggaggggtaggaggtggtctggggcctctgagcccaggcctgggattcctgcaggcggcaggaccagaaagggaacaggatttgataggctgagagaagagggcagggtgcagcccaggacaggctgtgaggtgtgttttggaggtcacagcgggcgtgtgtgtccatgtgtgtcagggaggggtttcgttgactcaggagactgtagagactcaatgatgaagggaccgtgtctcctagagcagagggtgagagtcaggggactccagtgcaaagtgggccaaatcccactgctgagtccaggctcacatcagccctgtcccagagcctggggcatgtgtgcagtggaaaccaagtcaccggtgacccacccacctgtcccagctgggtgcagtctcattctgcctggccacagtttaacccatgtgaccttgggcagtgggcctggtgccctggactatgtgcaaggtaggcagcctgtttgttcgaggggtgcaatggacagatgagctttaagggctggagccagagtttctctgatgctgtgaaattgagggcattgagctaagtgaccagaggggtccctcccacctaagccttctagtcctatgagcaccccctccctctcccactgtggcagtgagcctctctggtagggggtggggacgacacggagcaaacccagacaaaggctgggacacgagagtgctgctgcccaccagggtgcccacaaggtctgctcctggaggagacgggccctgacaagggcccttgggggagatggggtcctagtctgactcctcggggctcagactcagccaactgatagagctgttccccatccctccccgcccccgcctggctccaagtggtgccaacctgtcactgcaggcgatgaagcttgagcatgtcatggtaccccaaatggtgctcattaacctcccactgggggcacccctgcctgggcccagaattagacattcccacagagcccagccccaccttctctgtccttctgagggagtcagagctgaggaattcctctttttgctgagagacattggagagagacaacagaggggtacaggagatgccaaggcaggggtggcctcggagccccatggcgcctgggttcgctgtgggcagtgtcagaggctgtcccctcctcagtctcctgggccccctagcacatggacagggggcgtaacttagagagctgcagttgtggagggagagcggcctgggtgtgcagggaaggccaggcccagctttttcccctgcttctgccacccgaggggctcctggggatggagggcctgcctcttctccacggggatagagatggtctttcctgcttccctcccctgctccaacatccacttgagcggcaagtcagagccagtcctgggtacctctccccttccacccctcctgctcccctcctcctcttctgtctcacacccgctcccccctctctccccatctggcattctccagcatcttctccatcctctctcccctcctcctcttcccctcttctgctcagcctgttccttcctctctgtgtctgtctttgtgtcccctctcgcctgtctggctctctgggtcctatctctcactttccctctatctgggtgtctgggttcctgagttggacgtttctccaggattccccttctgtgcctatggcagaccatgctcacgctggttggagctacagagagaatagcagtgcgggtctgccaaggctgggtccctttctgtcttgaccctgggctccagaactataagggcctttgttttgctcagagctggggtctcaggggactgggtgaggcctcatctcagggctatcatggggaggcatggggtgggtaactcagcctgcctcctcggcctcctcatgccagttctgcacttgtcctcctgccggcctctctgaccagctgcctccctccccaggtgttcagcacttactccaacgaggattacgatcgtcgcaacgaggatgtggatcccatggcagcctctgctgagtacgagctggagaagcgtgtggagaggttggagctgttccctgtggagctggagaagggtgagaggccaggaggccacgtcacttgcgcacagctggggttgacccgggtctcatctctggcaccagctcctgccctgtgccctcaggggctcccacagacttgctgggcctctccctctgactcaggcccttggtgaccttccccgctcctcccttgtcagcacccagagcaaacagggcctccaacccaggccaagccacacccccaccaccccggtcatggaaccacatttgcacattcagttaacaggtctctgtagggtactgtgtgctaggtcctgggctctgtgttggggacacagtggtgggctcctggggagatggatgggggaggcagacatggaaggcacagtcacatctaatctcacccttaggcgctggaataggggctggggaaggtaaggaggggccactgtaaaagcgtttaacaggtgacctaaccagactgtgcttgggggcattctccagggaagtgaagcttgagttgcactctggtgaggaggaattaggggagtagtcaggaaaggggcttggctgcatttgcatagggagggcaagaagagcatgcaaatgaggccttgcagaccacgtggtcttgttgctaagatggattgggagccatttcgaagcacaggaaaggtctagaaagaccacaccaggctgtgatgtagggagggggtcacaagtggatggagaaaggccactgtggcgtggacaggaagatggcagagcgggtgtgggtggactggaaagatctccaggggtagaatccatagcatctgggggtcatttggctcaggtggaggctgtgagtgggagggaggaatccaggtgcctcccaggtctggcaggtggcaggtggtggtaccatcccccatgagggagtgtttgtgggggaaggtcattagttgggacatcagagggccatgagtcaggcaggggcaggtgtggataggggaatggacctcaggggagagaaaatctggaggtctttggtccttgaagctatgagtacagatgagactggctgagagggagaagaccaaaggcttagggctgagtcccatcctggctacccccatcctggctacccccatcctggccacacgccctggtctgcatatgcaacagtcttacctgcctgtgccacccttggcacgctcttctgcccattggttctttggaagggacaaagggcagggagcggctcaggagccatcctagtagacttggcaaagacggtggacagaactatatcccttcttcagttgtgggacatcccctaatggggactgcttcctgatgggggggctgtgccctggaattcggggtggagagtctctcgtctgtcccctacaagccctgccatctcaccactctctgttccacagactccgagggcctgggcatcagcatcatcggcatgggcgccggggcagacatgggcctggagaagctgggtatcttcgtcaagaccgtgacggagggtggtgcggcccatcgggatggcaggtaccaatcctccccagtctcgcctgaccctttttccctctccgaccggccatccttggtggggtgggccactgagcagggggtggggcgggccttccctgggagatttccgtgctgtgtgtgcagctgagatgttcggggagcactgccatgccaggtgctgttccaggccccagaaatacaacagtgagcactgtcagcccctatgccctgaaggagcgtgtgttctccaggaggggctggtgaccatgggggctataggcgtgtgttgtgcatcccggtctggagtacagtttgggccctggtagggagaagacaggcatggagtatatttgagcttttttttcgctggacattgagtctctgacagtgttgggccggtgctgggccctgggaagtcaatggtgagggcctggcgcacttgagaagtgtgcagtgtggtgtgaggtagacattgaataaatggacacacaaaaggtagtgaaatggagggaaatgcagactgctgtgaaggcatacaacaggagggtttaatctctctgggcattagggaaggcttcctggaggaagcagtgctggagctgagagctaaggctggagcaggagttagctgtgctgagggagtgagtgcagaggttccaggcagtggcgccatgagcaggcaggtgtggctggggcatagagagcaggggccaggaggctgtgactagacccattgatggcagtggctctggagacaggctgtctttgcgcatgtgagtgtgtgtgcctgtattgagcatctgtggttgcaaggggtgagttctgtgggacagaaggttcagggagggcatcctggagctgtgtgccagccagggacccctgtgttagctgtgtattccaggggtgtggggagtggcagtaggaagggctgtagggcatcccccagggtggctgtaagttagaggtgacattggggatctcttgtggtggtacctccaaacccagaccccctccatgtgacagaggtgagcaggtgtcctttgggatctgggtgactttgggatcttgtttctagagatggggctgccctgtcaaggggcttctacctgttgtggcccaggtggcatggagaggggccgggaacaggataccctttcatttaccccttcccctcccaatgtgaacttccagagcctttcccattgttgcctgtgggttgtctaaggagtgagtgtgcatggtggccgtggccactcactcatgcccacctgggagtggcatgtgttggggtgagctgttgacaataggccatttcctccatttccgtgtgggagtcctgagagaaggcctggagctcccagggaggtggagtggaggagggaggtgtctgagaggccccccaccctccatctccctcagcaggccagactgaacctccccttgtatggagaacacgggcttcaggggacacaactggagtgtgtcggcaggtgcacctgtatcaggtgtgtgtgggacagtgtgtgaactcgagagagtgccattcggtcttggggacttgggaggacatctgtgcactcagttctgtgcagaaatgtacacgtaagagggtggcatgtcacttgtgtgctgtggggctcctggccagtgtgcatggcagagatgaactctgagaatgtcacaccgctcagtcaagtatgatgaaggaggggacaagagtgtgattgtcacaggaagtgtgcctgccgcgtctcctggtcctggacgcctgtgtctgctttgcttgcctggctctcactgcccacacaggtgggcctggctgacacttaatcctctggccttgtgaatgttacgcaggtagacaaagtaccaggtccctgtgaggacaaagtatctgtgaggttttttgttgttgttttcttttcttgtttttttttgtttttttttttttttgaggcagggtcttactctgttgcccaggctggagtgcagtggcgcaaacacagctcactgcagccttgacctccctggctcaagtgatcctcccacttcatcctcccaagtaactgggactacaggcacgtgccaccatgcccagctaatttttctttttattgtttgtagagatgagttctcactatgtactcaggctggggagcctggagtttctgatgggaggaggctacctctaccctcgctcctcggttcccctgtgaccccttaaccaatgtcactccgctaggatccaggtgaatgatctcctggtggaggtggatggaacaagtctggtgggagtgacccagagcttcgcggcgtctgtgctccggaacaccaagggccgagtgcggtgagagcccagaggggtggggcgtgggagcgggcaggaggtcctcgtccaggcactccgttcacctgccttaacagccagttaaggttctggtggcccagctcacagaggttctgctgactccttggctgcaggagttgctgtgcctggagtccctcgcctcacacctgccttctcatcccagctccctggcaacagctggccaccagtactcagccttcctggcccactgtccaccagccctccaaactgtcctctagggcttcttctccttccccctacctgtccctgactcactgactgaagaaccaggacgtccagggtgaatgctaaccatattggggtcccctcattgggacctcatgccccccaccccgaccagccctatgtcatcctgggaagactccgccccaggcctgtaaccaaggggactggatcagaagctccctgtgtccactctacctttggcttaacattcagggatcactccctgcccccctgcaagaggggtactacccccaggaaagggtggtggagagaaacaggatgtgggtggccaccgggaggaggggctggtgcctggaagttccactatttcctctccatcctaatctccagttgccatcatcccgccccttcctgaagctcaggggcttggagcatacccaagaaacacctccgcagcccatccctgctgggagggtcatcttcacctttccctgcctcattttctcccctgtggcaggggaagagcctcctcagtgcatgtcccctgcagcacagcctagaggtgggctgacattctccctcccgcaatactggccagaggggtgaatgggccttcctgcctcccttgggaaggaaacctgataagggccctcattcccccattcattattaacactgcagccttcggactcagccctctcatctctcctcccctgggagggcctgagtttggagaggggagcatcagcagggaggatgatgcattacctggctgaggacagaggcagcggatgatgccggtgcccctgcaggtttatgattggccgggagcggccgggagagcagagcgaagtggcccagctaattcagcagactttggaacaggagcgatggcagcgggagatgatggagcagagatacgcccagtatggggaggatgacgaggaggtagggagtccctgcctggctggccgcgtggtcgccccctggtggctagatgaagcattacagtcatctgcctctactgcttcccctgccctagtaaaaagcccacagtgccattccctgtcctccagtcacactctttgtcttcagaggccggacaaggaatacacagtcctctcaaagagcccccagtctgcggggagagcatagcccctaatcttgggggacctaatctgaaagggagatagatccagaaggggaaagatagtacaggctgtttcttcagagacccaggctgatgaggaactgaccccctctgtcatcaggggactaccaggctgttgggggaagacataaaccgtgtctctggtccagcctcaggctgaagtgggaggcatgaaccacattcctgggtagctctctgtctggcatgggcaactggtcccagccctggtcatcagggctgagggcagctgggtggggtgggcccacagtctccggtctcccttcgcagacgggagagtatgccactgacgaggatgaggagctgagccccacgttcccgggtggtgagatggccatcgaggtgtttgagctagcggagaacgaggatgcactgtcccctgtggacatggagcccgagaagctggtgcacaagttcaaggaggtgggaggaggggctccctggagtggtggagggaaaggcaggcaggtctcctgcccttggcactgcctgccccaccctgctggagctgagtgcctgcccctctgcccaacagctccagatcaagcatgcggtcactgaggcagagatccagcagctgaaaagaaaggtaagggtgcgtatgtgtgtgcttttgcgtgcgtgcatgtgtgtgttgaggagcagggtccccctaccctcacacctgcacatgctgacacttaggcacaggtacccacagaacaagctgctctaaagcaagatgatatgatagatacgatattaagagcttaagctctggatccatctgctccagcatcacttgcttctctgtgcctcagcctcctcatctataaaatgaggtcgtaatagcaccaacaccacaggatcgttgtgggattaaatgagataacacacgtcaagtctttagcacaatgtgtgacataataggagctcaataaaaagtcaaagtaggctgagcgcagtggctcatgcctgtaatctcagcactttgggaggccaaggcagactgcttcagccaggagttagagaccagcctgggcaacatggcgaaaacctatctctacaaacaatacaaaaattagccaggtgtggtagcgcacaccagtgatcccagctacttgggtggctgaggtgggacgatcatttgggccagggtaggtcgaggctgcagtgagccgtgattgtgccactgcactccactccagcctgagtaacagaatgagaccatgtgtcaaaagaaaaaaaagtcagtatattagctgtgataccgaagcatgctaagttctgctctaggtgtctctatgtttgtgctgtcccacatatgtctgctatatataggcccattgataagtacagaccacccagaagtacacacactgacacagcagcctggccccaggcacatagtacccacagaccccctcacccagacacatagagacacccactctacacagacacagtcacagagacaatggacctgtgcttcacattacactcgaggctatcagcctggatatgcagacccactctgcacccatctgctctgaaacacacaggcatggccatcgatcagaccacctggtctaggaagagtgtcacagggcatgcatattctcatctgggcaagtaacacagaggtgctgatgccgaccccagatggagacacgtggcacacacacacacacacacacacacacacacacacacacacacgtagtatacacagatgcttacacaagcatgtcaggtgccagcaccctcacaggcatgcagatatacagacttcatattaaaagtctgtatggggcctctgctgggacctagactataggagtcccagtacctatggggcttctgccgtggtggggagagacagatctataggggtcttgcagacatgggagtgtgtgtaccctcccacatgggggtatgcaggagaggaggccagggtttggatggctggggcagaagcaggggcattcctggcagggagaggagctccatggagcttggagtctggctttgaggggaggccagtcaggaggtggcagcatgcctgtcggggagaggtggaggcagggctggactgccaggatgggctctggcttgcagtatcctgcctcccctctaaagactctggccttggtcctacagatagcatggggtatgtggccattgggatttttcggaaagccactgcctacaaagtgggagggcatgaaagtgggcagtgctgggaggcaggcaaactggttaggggcccagacagtgtcctggcaggggtaggccaggactgctcagagtataggcagagggtctggaaaggaagggtaggtgagcgctgcatttccggggtcagagtgacaggccatgttcctgaggtgtatgcagagtatgaaagggaggggcacgccaaaggtctgttagtgcattctacttacagacatcctctgggtaccttctagatgtccagtattgttctcatcaccatgatgggcaaagccatagttgatcgttgttcttgtgcatctgcaaaccagtgactgtgtcatcatcacacgctggcatggggctctgtaggagagaacaggcttactgagctgctaaagcaggaggaacctgattcgggtggaggtgggagtagggctgtgctgttggagggagctgtgggggcttttttggagaagtgacacacagcagagagctgaagggtgagctagagggaaataactaggcaagcaggagggtagatgggggacattccaggcagaggggacagcacacgtaaaggccctgtggcaagtctgaggatctgcaggaaggcctgtgtggctgggggacagagagcaagggatgtttgcagcaaatactggcctgagactgagtgccaacatggctatgaggttgtggcgccttttaacagagcaagtcaggaaaggaggcataggtttgtgcagctgcgggggcctggtctggggcatggtacctgggaggagctgggagctaaagctgggagttgggagcaagggtgggctgggacttgagatttgcagctcagagtgcacagaggtagtgtgggagatgggccggtgccccagggcagtgagtatagagagaacagaggatccggaactgagctgtgggggactggaggtctgcgctggggtcacctggaagctgggagagaaccaggattgttcaggaagccacaagtgcagagactggcgagcagggctggggctgcagagaggggacagagagtaatggtgaccctcatctgcccttttacttcacatgtactgtctcactggagcttttgtgagattgggaggcacatatcactgccattttacagatgggataactgaggcttgggacattagttgcattgcgccaagtcagagtatcagtgactaaccgaagcctccagcctccctgcgagtggggtgcagtgacagggagtctggtgggagctctgaggctgagctctacttctttcctctctgggtttcagttctcaggctcagccaaagagggttagtagttggggtgcaatggactccacaacggtaggaatcccctggcgactctggccccagtgctaggatgggggtaccctttggctcctgctggcccccaccaacccagggccgtgcctttctctctcagctgcagagcctggagcaggagaaggggcgctggcgggtggagaaggcgcagttggagcagagtgtggaggagaacaaggagcgcatggagaaactggaaggctactggggtgaggcccagagcctgtgccaggctgtggacgagcacctgcgggagactcaggcgcagtaccaggccctggagcgcaagtacagcaaggccaagcgcctcatcaaggactaccagcagaagtacgtggctgggggctgggcgggctgggcccagggagcattgagaggcttttggggacagtccctccccatccctccagctgagtagggaggcacagaagttggagggccccatggtggggacacccggtccggaatgaccaggcatcagagccagcacagagccagacccccagaggctttgggaaaacctggggcctcctgacctgagaacagggaaggacagagttgcccaggtaaagctgaggacctgggtcaccctggatgaaagccagaccacacacccttacctgccatctgtcccttgcctgtgcccagggagatcgagttcctgaaaaaggagactgcacagcgtcgggttctggaggagtcggagctggccagaaaggaggagatggacaagctcctggacaaggtgggcctggggcgccctgtgggcagggcccagtggagggagcagcattgaagcccctaccctgtgggtcctggagggaggggatgccatgtcctcaccggggggcggaaggggctgggatcatgcctggtgtccagacctgaccccctaccctcctttgttttccagatctcagaactggaaggaaacttgcaaacactgaggaattccaattctacttaacaggaatcattccatgactggacaataattaacccccctcccattgtcctccctcccctgtcctcaacaccccacccctcccccttccagcctggggacaggtgccccgactccccccacccctccaccccacctcccccagcttcagggaccagagggctcatatcacaggcccccttaagatggcctgggcagacagaggtggctagaagggcagcctctttcttgccccatggggctgaggcacagaggccgagggctgccgagggctggcctggtggtcgacggacacaagcacctgcagatcaaactgccagactttacacactccagcttttgtctctggactggaacggggctggggctctcccagcatctgccaactgggggctgctccctgcccatggggcacctgggtggcccctgggcctcttgacttgagattctaccttctcggcccttccctctccccccatcattgtgccgtctctgttgcattctgaccctcccgcctggggggtgggggcgttgcctcaacacctcccccatccctgttccctgtcctgggagggatagagtccaccccagagcccggaggctgggcctggccctggccctgcactgatttctcatgtgtccttcgggaaaagggggagtgagagtgggaaaaagggagagttcaggacacctggtccccagctccccattgcctggggcagcagccctcaatttctccttgtgcctcccctcttccaggtgccaaatagccataacctcgtcttggaactgttatgtggcctctctggggtccaggtttcctggtcaagcctgggaatgccagggaggaaagggggtctggctacagcgaccctggtcttaggcaaggggaacatttctccctggagagtcaggtcctatcctgtgctgccctgtctgcccagcccagggcgatgcctggaagcctactgacattgcagggagtcagcctcgcccccaccccctactggttttccaatgttttgactggagggcaaaattttactactactcatctttttggagaccagggctgccctgctggcagcctgccttctaagtgaaatcgactctgtttccccactttaaccccaaattggggcttggaccaagggaggtgagaccacctcccccaggtcccctcccctttcaaaatccatctcattttgccacttcatgcccctgccctaactgggtttttgttcattttttaaaaacagaccacccatcccatccgttttggcttcttgtcccctgtaaatagaccatgacttcgatcagtatttcttgtccccaccccttcctatccccagatgtgcccccatcccctgaaggagctggctgtctcagtcctgggctcgcgcacttcaccccggcagatggagggggcggaaccgggtgggcggggccgcttcgggctgcttgggccagcggccacccctgcccagccgtcgggagggccgcatctctgtatataatatatatatgtatgtattgttcccggttttgtacggaccatgccctctgtcaggtcgtccccataaaagcagcccccagagccttgctgcctggtttcttgattcactgaggtggggagtgggcagggatcaaggatgccaggctgccccagtggtcccctcccaccagtgctgcctctaaccctgaggaacttcctacagtgtccccccgtttccggttccagcaaactgcttttctgcccccattccagccatcagcacccatgctttttgtccagtcctcctgggcagggctgagggtttctagagagtttgtttagtctgcattcgtttttcagggcctctaagaagttcaaaggatgggctaaatacagcaaggtgaaccccaagtccctcccccagaaggcctttaaactgtggggacactctcaagaggcacccggtgtgaggcaggtaaaggatcaaaggattgctgggggtgggaggtgactgcctggcagtttagtacccagggtcctagaggatctgtttgccctttggggcgggccaagtggcctgaaatagccccagcccctgtgctgggccagcaggcctgtgtgctgactcaccagctcaaatgctaatgggtctgggagtctaggtgccagagttccagggacaagctttggtgaagtcccagaggggtgagagccagcagggaatggggcaggagcttatggcaggccccagggccagcctttccttgccggggtgctggtgtgcagatgtcagagacctgaagcatggaggcacttgcactcagtggtgtggcactagggaattctcacctttgccataaggaatgaagtcccaacttcagagcccttcaaggtcaccttggtgggtccttaacaacatccagatgagtggccagcacccccagggacagtctgctccagaagcttcccttgtagatggctgtgtcacacaggtcacattcatgctaagccaaattctggcttcccatagctatccctcaaaaaccctaggtctacacctcaggccagtccaatcctgcctcccacctgagggttgcctggaaacctggggatagtgaatactcttcccaaggcatctttgctatgtggacgattgttggaacactctgggagccctaaggatgctgaagacggatcaaggtgtctgatccccaagatcagagaccaccaaaccacagggtcagaggtcatggctccagagttagaagtcactgaaccccagggccaccaaggccctgctcaggaaacctagccaagaagtgaagtggcatgaccttcctgtaatctgtagtcttaatctgggtggggaggcaggcatgaaggtttcgagggtttctgctgggccgatgggggctaagcatccagggcggggtccctctgtccctcccccactccccgtctgtcctgtgtgttaggtgaggggcctatacatagtatgtttcaaacagtgggccaagtaacccctcacatttaagcccaagtgtgttgtgtgcctggaggtgtgtgtggctttgctgtgagtttctcaagcctgagctgtgacttgcccatgatacacagtatgtccatgtttgggactttgtcaagtagctgtaagtgggcctgtcaccttaaaccctccttatccccccactcacttgcccaattttggaagcttgagtaggtttgccaacacttgccaataaggcaacttattgccaaccctcagaagcttaggcctcactaggaataggggaacaggggctcctcctgggtcctatggcctggcaaacatacccatcatctccccacccccttgggatgtacagggtctatataatcaagccccccactacagcccaccactcagatctcaccagatgcctacaaagcacaacccctttaagacagccagatgcagcccccacagctgtcaacagaaaccccaccccttccccagatttccacaatctagcctcatggctgccagaagattctgaagacacccagagacccccaaactcctataaatcccctaggataccctcagaccctaaaggctgttaattctgtcctcactcatagtcacaagattgtcctggttcaacaggccacttcccggaggcctcggactgcagagtcctgtgggccatcagggaactctgtcctatagactccacacctctcctctgactctagacccctgatccagcttcaccacttgcctttttttttttttttttttttttttttttttttttttttgagatttgagtttcactctgttggccaggctgaaaggcagtggcacaatctcagctcactccaacctccacctcccaggttcaagcaattctcatgcctcagcctccagagtagcgccaccatgcctgactaatttttgtatttttagtagagacaagggtttcaccatgttggccaggctggtctcgaactcctgacctcatgtgatccacccaccttggcctcccaaagtgctgggattacagtcgtgagccactgcgcctggcctttcaccacttgctcttgagcaaagcactttccttcttctaagtctctgttttctctgaggcagtgggtaatggaaacacccaccttgtgggtttattgtgagggtgacaatagatgatctgagagcgcctggcacctgccaagctgtgacgtgcggtagctggttgtggatccctacattgcctccctggctggcctgccactaccatcagcgcactgggtccaagtctgatctcatccgtccccacccccacctgctccagggcttcctgcctcaagccaaggtccacagccatcctagacccctcctccctcacctcctagtccagcaggtccccaaatcctgtcagcttcttcggtgtcagcttcttcaggcctgcatcctgaagggctctcagcttaatctgtaatctttatgcccactgccaccggccctcaatagcctccagcgggtctccctgccttcagagtgccctctgtaaccctgtctccaggggagccaagggtgcttcctaaatgcacacctgagcccctccctcctcttaattttgtgtgtgtgcgcgcgcgcgcgtgtgtgtgtgtgtgtgtgtgtgtgtgtgggcggcggggtgggcggctggtagaataaagtgcaagccccctgcacctccccagcttcaatttatcttcccctcttgccctcccacccccaacaccccctggcacttccctaccctggcccgcagttgtagccaacacatcacatcctctgggaatcccccagcccagctcccgccgcggccgcctggacccaggccgggccaggggtgcgctctcccttccggcaagaagtgccctctgttagctgggcccatggcgcccaggctcgtgagggcctccccactcgtctgagcccccgactggcccactggccttgagcgcagttagggggcgggggttctgttcaccgctgtcccctccagcctcggcgccccggctgctcggcggacgtttgttgaatgaatgaactaatcgggagccctgatggacccggcagaggaggcggaagccccgtgggtcccgtggcgggaccgccccggagccgctcccacccgcgcagactccggtgcgccgcgtctcccgcgggcagagaagtagctgcaactccgctccccggccccagccgcctcctccccgccgccctcccccgcccccgccccctcgctccctcccgctctttgtctcctgggcgcccggcttctccgccacgcgccccccaccccgacgccccttccccggagacccccgcggacccctgccgacgcgacgccgcgcgaatcggccctgccaggcgggggccccgcgtccggccaggcctggcgggcggcaggggcggggagggaggtggcgctcgctcttcgctcttctctctctctctctctctgtcacacacacacacacgcacacgcacacgcacacacacacggagcatcctcccgtcaggtctcctggtccagccccgcccgcgcctcctgcttccagcgaacctgttccctctccccacatcccccgccctccatctcccccggctctgggacccttcccgccgacctcacccccacccccgggatggagcggctcgagcccgcccggagccccccgcggccggggtgacggtccccccacccctctcctgcccggcccccgcctcgagcaccatgggcctgaggggttcccggggcgccagacgctgaagatgaccgatgccggaggtgaaggggccgggcgccctggggtggaccgggaactggggctagggcactcgggcccgcggtgggaccctgagtggggttgggcagggctaagcgacaagggcctttcttcccctatccctagggggaccgcacggggctggggtgccgggctgtcaggggagggggcggagataggatttatggccctaatcccctccctcccgcccgacgcccggagaaattaataaaaagctggtgtggggggagggggagagggcttaactctttcttgcccggcggggagttgtgctgatggtttggagagaaactagccaccgggctctgactggggagaagggctctgagagtggagtaggtgccctgtccccaacctcaccccatctccaacagtgctttgagggggtgcccgactcctgaggactaccccaagcctggggccagtggacggccggcgatatgggaaggggggaccacctctctggctccacaactgcctccccgaccgctagtctcctttcccatccacctcttcccggcctctcccagttgcacttctctctgtcgctttctcctcttcaggggccctttcctatcgcctgcccgaagggcttctcccttctctcccaccctcgggcgtcacttagagcggcggaagcccttgttcccagtgccagttcccgtggccccactctcggtgtgatctctttcttctcagcagccctgtggactctccgccagtttgtgtgtctgtctctgcttcttcctactcctcacttccttccgctcccgctcccgctccctccccaggaattgtgcgccctttcttcctttctccttctcctgggtcccaagaggctgtgagctcacctgcctccctttctcccagagaagggtcaaaggtcattggtgctccttctccaggattggaagccttggggggaagggtatccagaggaaccggttcaatcccacccttgtgcagttacctggctgaatgggggtgtgtgtgtgtgtgtgtgtgtgtgtgtgtgagagagtgtgcggggtgtgtgtgggagtgagagtgggggcgggtttggtgtctaatttttctaggctcagttttggaaggagagggttgggtgggaggggtctggtgaccccctggacacaatgtagggagggtccccctacacaccccagaaagttagttgttgaagggaagaaaagagagcagtttgtgctgaatcaggatggaccgagaatggctttgagcaggaaaccccaatccagcccagagggtgcctggaagaggaggactccagccagcagaggatctcgaccctggaatgggctcttgaataaagaacacaggatcttcattctcagaggcagaaaggagacaacactactgccctcagagagcctccattctgatgggagaggcagttcctgtcttcacagtccctagtctgacggaagaatacgtggaccctttcttctctgggctcccatctgattggtgggggggagatgagacctatttaaggaatcagtgaagtatgaagaattccccatttcccagtagttggagaagggtggatttagaaattacgaagacaaatgagaggagggagggctacctaggacagcttcctgaaggaggtggcagctgggtcctagccagataaggctttgtggttgaatcaggaaatgtggttaattcttagggtcagccttccttcccatctggcctgtcaggacaggaagaaatgttctagatctttgctagtagcccctggagttcaagaatggcaggagggttctcggagagtctgcttccctgatgaccccttcccacacctcattttctgctttcagccccaggcatttatggaatctggaggtggttttgttttttgtttttttttttgagacagagttttgcgcttgttgcccaggctggagtgcaatggcacgatctcggctcactgcaacctccggctcccagcttcaagcgattctcctgcctctgtctcccgagtagctgggattacaggaatgtgccaccacacccggctaattttgtatttttagtagagacagttttttccatgttggtcaggctggtctcaaactcccgacctcaggtgatctgcccgcctcggcctcccaaagtgctgggattacaggcgtgaggcactgcgcccagcctagaggtggttttgatgcttctcccagtcctggtcagtgtggagcagcttccctccctctatgcttatctcttcctccacccctaaactgaagatcatcacctaggatagcgcagaggggcaggagccctggctcaaggctgagttctgcctcttttattattattattattattgcttttatttatttatttacttatttacttaatttttttttttttgagatggagtctccctcttgtcacccaggctggagtgcaatggcatgatgtcggctcactgcaacctccacctctcaggttcaagtgattctcctgcctcagcctcctgagtagctgggattacaggtgtgcaccaccacacccaactaatttttgtgtttttagtagagacggggtttcaccatgttggccaggttggtctcaaactcctgacctcaggtgatctgcccgcctcggcctcccaaagtgctgggattacaggcgtgagctatcacgcccagctacttacttatttttgagatgagggtctcactatgttgcccaggctggtctagaattcctgggctcaagtgatcctcccacctcagtctcctgagtagctaggattataagcatgcaccaactttgcctggcttcctctcatctcctgtttctcagttttcacatctgtaaagtggcgatatgtatctgtaaagtggggatatgaaaattcccaggccaggcgcggtggctcacgcctgtaatcccaacactttgggaggccgaggcgggtggatcacgaggtcaggagatcaagaccatcctggctaacatggtgaaaccctgtctctactaaaaatacaaaaaaattagccaggcgtggtggtgggcgactgtagtcccagctactcgggaggctgaggcaggagaatggcgtggacccgggaggcagagcttgcagtgagccaagatagcgccactgcactccagcctgggtgacagagtgagactccgtctcaaaaaaaaaaaaaaaaattcccaaggctggccacagtaaaggtagatgatgtctatgtaataacagaaaagaagagttggaaaagaccccagcaggcatgtggcctagccttcctacatctgacacatgtatgatctagctcagtgccttgccattctcctggggacctgagtgttagaagtaattggaggtcatgtctcagccatgcagcgtccccttgccttaaaccatcaatggcccctgggcttcctcactctccccccagccagtatcccctggccagtgggctccctagggctactggaatcctacatctgcttgaaagcctattcaaatggtttcagctatatatatccttccctatctgccctcccttcttgcttcccaccaaaaaaccttgaaccaaaacaaaaaaaaccctacccattcacacttcttcccagaacatagttgcatcatagaggtttggctgtccattgtgtgctgtgtgtattcctcgtaccctcctacatctatgagtctgtcaagaactgtgagaactgtgtctggaacagtggccctgctgatggtgccagcttcctgaacagctcttgttcagaaaggcaggtggtgagggcaccagtgatgggggtgtagggaagggggaggcaggattggaaaagagatggagaattgatggatgcaaagataggtggatggacagatggcggcaggtgttgggtgcatgggagcagatgtgggatggacggatgggtggatagatgggtgagtgaatggatgatgagtaggcaagtagataggtggatgagtgcataggtgggtagacggatggtagaacctgggtcctggtcctgattttgccattaacttgctatgtgatcttgggccaatcactcccccttctgtttcttcatttgtaacatgagaggattggatttaataatctccatgacttctcccagatttgattggacagttgatgattgaaagcttttaggggatgctaatgatgcgaaggcccaagacagtgaaggggagaagttcagtgacccacgtgaaggcacacagcaaatcagtggaccaggataccaggaccacagggctcagcctgtgtctgtgccttggttttgcgtctgcccccaccctcctactatactgcctgccccggcgcccaccatctgggttatgattccagtggcttctcttccaggggacagaagaagggttctaaggtaaggggaggggccaacaggcctggagcaggtagccttccacatctcttctgcctcggtcagcctgaatctctaacccaggctctctttttctttctctcccctcttgtccttcccagctctcttgagtcatggcttcttcaaagctccgagaacccgtggatgaagtttttggtaagttctgtgtggctctatctctagccaatagacacagccatagagtacttccttcctgggccaccaggcattgaaggggatagggtgcttcttggcagcttcagagtgtgtgtgtgtgtgtgtgtgtgtgtgtgtgtgtgtgtgcgcgcgcgcgtgcacgcgtgcaggtattgtggcctgaccctttgtcaccactatcttagtggacacaccagttataacaataagggtctccatttattaagtgcttctcttatgccagatactaggttaagcacccccatctcacatgcactgtattagttaacccttacaataatgtaagcccagtttacagaccaggagtgtagggtacagagggctgaagtgacttgctttcaagatcacattgcaagttagtggcagggctgggactagaaccccaaactgccagacttcctgctcttagtgactatcctatacatctgtaaactccagcccagatgacacacgttacctccaagtcacataaataagtgcaagggacctcaccctgcttggatgtgtgctgaaatcaaatgcataacatacacagcctcaatacccccaggctggccccctcatgctggcctgcacgcccacgtcctcagtacacactggggtgcatgcacacaccacggtaccatcatttaccccctgcaatcttctcttgtgtggactggagaaagaaaccaccccagctgggcagagttcccagcatgcactggggcggaaagccggtttcccagcgggattccggtggaggagtcaggaggagtcctgagcaaaggaacttggaggaatgagggagagggtgagagcggcctgctcctcgaggggctcctatgccagagggtccccagcttctcctcatctctcccttcttccctctctcccctggtcatgccaggaactgctgcttcccatcccagtctcctccagctcccctagccttgaactgcctcagggcctcaatctcagtgtctgtccctactcaggcctgacttaagcccaggcctgacggaaacgagctctcccttccctgggcttttctgcccctactccccaacctccctaccctctactccccacaccaacccctgcctgttttcctcactgctgaggtagctgcgtcctcactgcttcctgatgtgaaaggc

SEQ ID NO: 1457 - DNA, 3695 bp, Homo sapiens
ccccaccatgatgaagacggagccacgggggcccgggggtcccctccggagcgcctccccgcaccgcagcgcctacgaggcgggcatccaggcgctgaagccgcccgacgcgcccgggcccgacgaggcacccaagggggcccaccacaagaaatatggctccaacgtccaccgcatcaaaagtatgttcctgcagatgggcacgacggcggggccctcgggcgaggcgggcggcggcgcgggcctggccgaggccccacgggcgtccgagcgcggcgtgcgcctgtcgctgccgcgggccagcagcctgaacgagaacgtggaccacagcgccctgctgaagctgggcaccagcgtgtcggagcgcgtgagccgcttcgactccaagcccgcgccctccgcgcagcctgcgccgccgccgcacccgccgtcccggctgcaggagacgcggaagctgttcgaacggagcgccccagcggccgcaggcggcgacaaggaggccgcggcgcggcggctgctgaggcaggagcgcgccggcctgcaggaccggaagctggacgtcgtggtgcgcttcaacggcagcaccgaggcgctggacaagctggacgctgacgccgtgtcccccacggtcagccagctcagcgccgtcttcgagaaggccgactcgaggaccggcctccaccgcgggcccgggctccccagggccgcaggggttccccaggtcaactcgaagctggtcagcaagcggtcccgggtgttccagcccccgccgccgccgccgcccgccccgtcgggggatgccccggccgagaaagagcgatgccccgcagggcagcagcccccgcagcaccgagtggcccctgcccggccgccccccaagccccgggaggtgcgcaagattaagccggtggaggtggaggagagcggggagtcggaggccgagtcggcgcccggggaggtgatccaggccgaggttacggtccacgcggccctggagaatggcagcaccgtggcaactgcagccagccccgcgcccgaggagccaaaggcccaagcggccccggagaaggaggcggcggcggtagcgccgccagagaggggggtgggcaatggccgggccccggacgtggcccctgaggaggtagatgaatccaagaaggaggacttctcggaggcggacttggtggacgtgagcgcctacagtgggctcggggaggactctgcgggcagtgccctggaggaggacgacgaagacgacgaggaggatggggagcccccctacgagcccgagtcggggtgcgtggagatcccggggctgtcggaggaggaggacccagccccgagccggaagatccatttcagcacggcgcccatccaagtgttcagcacttactccaacgaggattacgatcgtcgcaacgaggatgtggatcccatggcagcctctgctgagtacgagctggagaagcgtgtggagaggttggagctgttccctgtggagctggagaaggactccgagggcctgggcatcagcatcatcggcatgggcgccggggcagacatgggcctggagaagctgggtatcttcgtcaagaccgtgacggagggtggtgcggcccatcgggatggcaggatccaggtgaatgatctcctggtggaggtggatggaacaagtctggtgggagtgacccagagcttcgcggcgtctgtgctccggaacaccaagggccgagtgcggtttatgattggccgggagcggccgggagagcagagcgaagtggcccagctaattcagcagactttggaacaggagcgatggcagcgggagatgatggagcagagatacgcccagtatggggaggatgacgaggagacgggagagtatgccactgacgaggatgaggagctgagccccacgttcccgggtggtgagatggccatcgaggtgtttgagctagcggagaacgaggatgcactgtcccctgtggacatggagcccgagaagctggtgcacaagttcaaggagctccagatcaagcatgcggtcactgaggcagagatccagcagctgaaaagaaagctgcagagcctggagcaggagaaggggcgctggcgggtggagaaggcgcagttggagcagagtgtggaggagaacaaggagcgcatggagaaactggaaggctactggggtgaggcccagagcctgtgccaggctgtggacgagcacctgcgggagactcaggcgcagtaccaggccctggagcgcaagtacagcaaggccaagcgcctcatcaaggactaccagcagaaggagatcgagttcctgaaaaaggagactgcacagcgtcgggttctggaggagtcggagctggccagaaaggaggagatggacaagctcctggacaagatctcagaactggaaggaaacttgcaaacactgaggaattccaattctacttaacaggaatcattccatgactggacaataattaacccccctcccattgtcctccctcccctgtcctcaacaccccacccctcccccttccagcctggggacaggtgccccgactccccccacccctccaccccacctcccccagcttcagggaccagagggctcatatcacaggcccccttaagatggcctgggcagacagaggtggctagaagggcagcctctttcttgccccatggggctgaggcacagaggccgagggctgccgagggctggcctggtggtcgacggacacaagcacctgcagatcaaactgccagactttacacactccagcttttgtctctggactggaacggggctggggctctcccagcatctgccaactgggggctgctccctgcccatggggcacctgggtggcccctgggcctcttgacttgagattctaccttctcggcccttccctctccccccatcattgtgccgtctctgttgcattctgaccctcccgcctggggggtgggggcgttgcctcaacacctcccccatccctgttccctgtcctgggagggatagagtccaccccagagcccggaggctgggcctggccctggccctgcactgatttctcatgtgtccttcgggaaaagggggagtgagagtgggaaaaagggagagttcaggacacctggtccccagctccccattgcctggggcagcagccctcaatttctccttgtgcctcccctcttccaggtgccaaatagccataacctcgtcttggaactgttatgtggcctctctggggtccaggtttcctggtcaagcctgggaatgccagggaggaaagggggtctggctacagcgaccctggtcttaggcaaggggaacatttctccctggagagtcaggtcctatcctgtgctgccctgtctgcccagcccagggcgatgcctggaagcctactgacattgcagggagtcagcctcgcccccaccccctactggttttccaatgttttgactggagggcaaaattttactactactcatctttttggagaccagggctgccctgctggcagcctgccttctaagtgaaatcgactctgtttccccactttaaccccaaattggggcttggaccaagggagaaaaacagaccacccatcccatccgttttggcttcttgtcccctgtaaatagaccatgacttcgatcagtatttcttgtcc

SEQ ID NO: 1458 - protein, 809 aa, Homo sapiens
MMKTEPRGPGGPLRSDHRSAYEAGIQALKPPDAPGPDEAPKGAHHKKYGSNVHRIKSMFLQMGTTAGPSGEAGGGAGLAEAPRASGVRLSLPRASSLNENVDHSALLKLGTSVSVSRFDSKPAPSAQPAPPPHPPSRLQETRKLFERSAPAAAGGDKEAAARRLLRQERAGLQDRKLDVVVRFNGSTEALDKLDADAVSPTVSQLSAVFEKADSRTGLHRGPGLPRAAGVPQVNSKLVSKRSRVFQPPPPPPPAPSGDAPAEKERCPAGQQPPQHRVAPARPPPKPREVRKIKPVEVEESGESEAESAPGEVIQAEVTVHAALENGSTVATADAPEEPKAQAAPEKEAAAVAPPERGVGNGRAPDVAPEEVDESKKEDFSEADLVDVSAYSGLGEDSAGSALEEDDEDDEEDGEPPYEPESGCVEIPGLSEEEDPAPSRKIHFSTAPIQVFSTYSNEDYDRRNEDVDPMAASAEYELEKRVERLELFPVELEKDSEGLGISIIGMGAGADMGLEKLGIFVKTVTEGGAAHRDGRIQVNDLLVEVDGTSLVGVTQSFAASVLRNTKGRVRFMIGRERPGEQSEVAQLIQQTLEQERWQREMMEQRYAQYGEDDEETGEYATDEDEELSPTFPGGEMAIEVFELAENEDALSPVDMEPEKLVHKFKELQIKHAVTEAEIQQLKRKLQSLEQEKGRWRVEKAQLEQSVEENKERMEKLEGYWGEAQSLCQAVDEHLRETQAQYQALERKYSKAKRLIKDYQQKEIEFLKKETAQRRVLEESELARKEEMDKLLDKISELEGNLQTLRNSNST

SEQ ID NO: 1459 - DNA, 4056 bp, Homo sapiens
ccccaccatgatgaagacggagccacgggggcccgggggtcccctccggagcgcctccccgcaccgcagcgcctacgaggcgggcatccaggcgctgaagccgcccgacgcgcccgggcccgacgaggcacccaagggggcccaccacaagaaatatggctccaacgtccaccgcatcaaaagtatgttcctgcagatgggcacgacggcggggccctcgggcgaggcgggcggcggcgcgggcctggccgaggccccacgggcgtccgagcgcggcgtgcgcctgtcgctgccgcgggccagcagcctgaacgagaacgtggaccacagcgccctgctgaagctgggcaccagcgtgtcggagcgcgtgagccgcttcgactccaagcccgcgccctccgcgcagcctgcgccgccgccgcacccgccgtcccggctgcaggagacgcggaagctgttcgaacggagcgccccagcggccgcaggcggcgacaaggaggccgcggcgcggcggctgctgaggcaggagcgcgccggcctgcaggaccggaagctggacgtcgtggtgcgcttcaacggcagcaccgaggcgctggacaagctggacgctgacgccgtgtcccccacggtcagccagctcagcgccgtcttcgagaaggccgactcgaggaccggcctccaccgcgggcccgggctccccagggccgcaggggttccccaggtcaactcgaagctggtcagcaagcggtcccgggtgttccagcccccgccgccgccgccgcccgccccgtcgggggatgccccggccgagaaagagcgatgccccgcagggcagcagcccccgcagcaccgagtggcccctgcccggccgccccccaagccccgggaggtgcgcaagattaagccggtggaggtggaggagagcggggagtcggaggccgagtcggcgcccggggaggtgatccaggccgaggttacggtccacgcggccctggagaatggcagcaccgtggcaactgcagccagccccgcgcccgaggagccaaaggcccaagcggccccggagaaggaggcggcggcggtagcgccgccagagaggggggtgggcaatggccgggccccggacgtggcccctgaggaggtagatgaatccaagaaggaggacttctcggaggcggacttggtggacgtgagcgcctacagtgggctcggggaggactctgcgggcagtgccctggaggaggacgacgaagacgacgaggaggatggggagcccccctacgagcccgagtcggggtgcgtggagatcccggggctgtcggaggaggaggacccagccccgagccggaagatccatttcagcacggcgcccatccaagtgttcagcacttactccaacgaggattacgatcgtcgcaacgaggatgtggatcccatggcagcctctgctgagtacgagctggagaagcgtgtggagaggttggagctgttccctgtggagctggagaaggactccgagggcctgggcatcagcatcatcggcatgggcgccggggcagacatgggcctggagaagctgggtatcttcgtcaagaccgtgacggagggtggtgcggcccatcgggatggcaggatccaggtgaatgatctcctggtggaggtggatggaacaagtctggtgggagtgacccagagcttcgcggcgtctgtgctccggaacaccaagggccgagtgcggtttatgattggccgggagcggccgggagagcagagcgaagtggcccagctaattcagcagactttggaacaggagcgatggcagcgggagatgatggagcagagatacgcccagtatggggaggatgacgaggagacgggagagtatgccactgacgaggatgaggagctgagccccacgttcccgggtggtgagatggccatcgaggtgtttgagctagcggagaacgaggatgcactgtcccctgtggacatggagcccgagaagctggtgcacaagttcaaggagctccagatcaagcatgcggtcactgaggcagagatccagcagctgaaaagaaagctgcagagcctggagcaggagaaggggcgctggcgggtggagaaggcgcagttggagcagagtgtggaggagaacaaggagcgcatggagaaactggaaggctactggggtgaggcccagagcctgtgccaggctgtggacgagcacctgcgggagactcaggcgcagtaccaggccctggagcgcaagtacagcaaggccaagcgcctcatcaaggactaccagcagaaggagatcgagttcctgaaaaaggagactgcacagcgtcgggttctggaggagtcggagctggccagaaaggaggagatggacaagctcctggacaagatctcagaactggaaggaaacttgcaaacactgaggaattccaattctacttaacaggaatcattccatgactggacaataattaacccccctcccattgtcctccctcccctgtcctcaacaccccacccctcccccttccagcctggggacaggtgccccgactccccccacccctccaccccacctcccccagcttcagggaccagagggctcatatcacaggcccccttaagatggcctgggcagacagaggtggctagaagggcagcctctttcttgccccatggggctgaggcacagaggccgagggctgccgagggctggcctggtggtcgacggacacaagcacctgcagatcaaactgccagactttacacactccagcttttgtctctggactggaacggggctggggctctcccagcatctgccaactgggggctgctccctgcccatggggcacctgggtggcccctgggcctcttgacttgagattctaccttctcggcccttccctctccccccatcattgtgccgtctctgttgcattctgaccctcccgcctggggggtgggggcgttgcctcaacacctcccccatccctgttccctgtcctgggagggatagagtccaccccagagcccggaggctgggcctggccctggccctgcactgatttctcatgtgtccttcgggaaaagggggagtgagagtgggaaaaagggagagttcaggacacctggtccccagctccccattgcctggggcagcagccctcaatttctccttgtgcctcccctcttccaggtgccaaatagccataacctcgtcttggaactgttatgtggcctctctggggtccaggtttcctggtcaagcctgggaatgccagggaggaaagggggtctggctacagcgaccctggtcttaggcaaggggaacatttctccctggagagtcaggtcctatcctgtgctgccctgtctgcccagcccagggcgatgcctggaagcctactgacattgcagggagtcagcctcgcccccaccccctactggttttccaatgttttgactggagggcaaaattttactactactcatctttttggagaccagggctgccctgctggcagcctgccttctaagtgaaatcgactctgtttccccactttaaccccaaattggggcttggaccaagggaggtgagaccacctcccccaggtcccctcccctttcaaaatccatctcattttgccacttcatgcccctgccctaactgggtttttgttcattttttaaaaacagaccacccatcccatccgttttggcttcttgtcccctgtaaatagaccatgacttcgatcagtatttcttgtccccaccccttcctatccccagatgtgcccccatcccctgaaggagctggctgtctcagtcctgggctcgcgcacttcaccccggcagatggagggggcggaaccgggtgggcggggccgcttcgggctgcttgggccagcggccacccctgcccagccgtcgggagggccgcatctctgtatataatatatatatgtatgtattgttcccggttttgtacggaccatgccctctgtcaggtcgtccccataaaagcagcccccagag

SEQ ID NO: 1460 - protein, 809 aa, Homo sapiens; identical to SEQ ID NO: 1458

SEQ ID NO: 1461 - DNA, 4062 bp, Homo sapiens
ccccaccatgatgaagacggagccacgggggcccgggggtcccctccggagcgcctccccgcaccgcagcgcctacgaggcgggcatccaggcgctgaagccgcccgacgcgcccgggcccgacgaggcacccaagggggcccaccacaagaaatatggctccaacgtccaccgcatcaaaagtatgttcctgcagatgggcacgacggcggggccctcgggcgaggcgggcggcggcgcgggcctggccgaggccccacgggcgtccgagcgcggcgtgcgcctgtcgctgccgcgggccagcagcctgaacgagaacgtggaccacagcgccctgctgaagctgggcaccagcgtgtcggagcgcgtgagccgcttcgactccaagcccgcgccctccgcgcagcctgcgccgccgccgcacccgccgtcccggctgcaggagacgcggaagctgttcgaacggagcgccccagcggccgcaggcggcgacaaggaggccgcggcgcggcggctgctgaggcaggagcgcgccggcctgcaggaccggaagctggacgtcgtggtgcgcttcaacggcagcaccgaggcgctggacaagctggacgctgacgccgtgtcccccacggtcagccagctcagcgccgtcttcgagaaggccgactcgaggaccggcctccaccgcgggcccgggctccccagggccgcaggggttccccaggtcaactcgaagctggtcagcaagcggtcccgggtgttccagcccccgccgccgccgccgcccgccccgtcgggggatgccccggccgagaaagagcgatgccccgcagggcagcagcccccgcagcaccgagtggcccctgcccggccgccccccaagccccgggaggtgcgcaagattaagccggtggaggtggaggagagcggggagtcggaggccgagtcggcgcccggggaggtgatccaggccgaggttacggtccacgcggccctggagaatggcagcaccgtggcaactgcagccagccccgcgcccgaggagccaaaggcccaagcggccccggagaaggaggcggcggcggtagcgccgccagagaggggggtgggcaatggccgggccccggacgtggcccctgaggaggtagatgaatccaagaaggaggacttctcggaggcggacttggtggacgtgagcgcctacagtgggctcggggaggactctgcgggcagtgccctggaggaggacgacgaagacgacgaggaggatggggagcccccctacgagcccgagtcggggtgcgtggagatcccggggctgtcggaggaggaggacccagccccgagccggaagatccatttcagcacggcgcccatccaagtgttcagcacttactccaacgaggattacgatcgtcgcaacgaggatgtggatcccatggcagcctctgctgagtacgagctggagaagcgtgtggagaggttggagctgttccctgtggagctggagaaggactccgagggcctgggcatcagcatcatcggcatgggcgccggggcagacatgggcctggagaagctgggtatcttcgtcaagaccgtgacggagggtggtgcggcccatcgggatggcaggatccaggtgaatgatctcctggtggaggtggatggaacaagtctggtgggagtgacccagagcttcgcggcgtctgtgctccggaacaccaagggccgagtgcggtgagagtttatgattggccgggagcggccgggagagcagagcgaagtggcccagctaattcagcagactttggaacaggagcgatggcagcgggagatgatggagcagagatacgcccagtatggggaggatgacgaggagacgggagagtatgccactgacgaggatgaggagctgagccccacgttcccgggtggtgagatggccatcgaggtgtttgagctagcggagaacgaggatgcactgtcccctgtggacatggagcccgagaagctggtgcacaagttcaaggagctccagatcaagcatgcggtcactgaggcagagatccagcagctgaaaagaaagctgcagagcctggagcaggagaaggggcgctggcgggtggagaaggcgcagttggagcagagtgtggaggagaacaaggagcgcatggagaaactggaaggctactggggtgaggcccagagcctgtgccaggctgtggacgagcacctgcgggagactcaggcgcagtaccaggccctggagcgcaagtacagcaaggccaagcgcctcatcaaggactaccagcagaaggagatcgagttcctgaaaaaggagactgcacagcgtcgggttctggaggagtcggagctggccagaaaggaggagatggacaagctcctggacaagatctcagaactggaaggaaacttgcaaacactgaggaattccaattctacttaacaggaatcattccatgactggacaataattaacccccctcccattgtcctccctcccctgtcctcaacaccccacccctcccccttccagcctggggacaggtgccccgactccccccacccctccaccccacctcccccagcttcagggaccagagggctcatatcacaggcccccttaagatggcctgggcagacagaggtggctagaagggcagcctctttcttgccccatggggctgaggcacagaggccgagggctgccgagggctggcctggtggtcgacggacacaagcacctgcagatcaaactgccagactttacacactccagcttttgtctctggactggaacggggctggggctctcccagcatctgccaactgggggctgctccctgcccatggggcacctgggtggcccctgggcctcttgacttgagattctaccttctcggcccttccctctccccccatcattgtgccgtctctgttgcattctgaccctcccgcctggggggtgggggcgttgcctcaacacctcccccatccctgttccctgtcctgggagggatagagtccaccccagagcccggaggctgggcctggccctggccctgcactgatttctcatgtgtccttcgggaaaagggggagtgagagtgggaaaaagggagagttcaggacacctggtccccagctccccattgcctggggcagcagccctcaatttctccttgtgcctcccctcttccaggtgccaaatagccataacctcgtcttggaactgttatgtggcctctctggggtccaggtttcctggtcaagcctgggaatgccagggaggaaagggggtctggctacagcgaccctggtcttaggcaaggggaacatttctccctggagagtcaggtcctatcctgtgctgccctgtctgcccagcccagggcgatgcctggaagcctactgacattgcagggagtcagcctcgcccccaccccctactggttttccaatgttttgactggagggcaaaattttactactactcatctttttggagaccagggctgccctgctggcagcctgccttctaagtgaaatcgactctgtttccccactttaaccccaaattggggcttggaccaagggaggtgagaccacctcccccaggtcccctcccctttcaaaatccatctcattttgccacttcatgcccctgccctaactgggtttttgttcattttttaaaaacagaccacccatcccatccgttttggcttcttgtcccctgtaaatagaccatgacttcgatcagtatttcttgtccccaccccttcctatccccagatgtgcccccatcccctgaaggagctggctgtctcagtcctgggctcgcgcacttcaccccggcagatggagggggcggaaccgggtgggcggggccgcttcgggctgcttgggccagcggccacccctgcccagccgtcgggagggccgcatctctgtatataatatatatatgtatgtattgttcccggttttgtacggaccatgccctctgtcaggtcgtccccataaaagcagcccccagag

SEQ ID NO: 1462 - protein, 569 aa, Homo sapiens
MMKTEPRGPGGPLRSDHRSAYEAGIQALKPPDAPGPDEAPKGAHHKKYGSNVHRIKSMFLQMGTTAGPSGEAGGGAGLAEAPRASGVRLSLPRASSLNENVDHSALLKLGTSVSVSRFDSKPAPSAQPAPPPHPPSRLQETRKLFERSAPAAAGGDKEAAARRLLRQERAGLQDRKLDVVVRFNGSTEALDKLDADAVSPTVSQLSAVFEKADSRTGLHRGPGLPRAAGVPQVNSKLVSKRSRVFQPPPPPPPAPSGDAPAEKERCPAGQQPPQHRVAPARPPPKPREVRKIKPVEVEESGESEAESAPGEVIQAEVTVHAALENGSTVATADAPEEPKAQAAPEKEAAAVAPPERGVGNGRAPDVAPEEVDESKKEDFSEADLVDVSAYSGLGEDSAGSALEEDDEDDEEDGEPPYEPESGCVEIPGLSEEEDPAPSRKIHFSTAPIQVFSTYSNEDYDRRNEDVDPMAASAEYELEKRVERLELFPVELEKDSEGLGISIIGMGAGADMGLEKLGIFVKTVTEGGAAHRDGRIQVNDLLVEVDGTSLVGVTQSFAASVLRNTKGRVR

SEQ ID NO: 1463 - DNA, 286023 bp, Mus musculus
  misc_feature (1)...(286023): n = A,T,C or G
acatataaacttacaaccagtgtacaaacatacatgcaggcaaaacacccatacataaaataattttaaaatttttacactcctggtttcacattcaaatcagcagggtcactcagctgatatttgtgagtattctacactctgtacttagttctcttaaaaccaaacaatcaatccttagtgagtgtatcctaggtgacactgaactgtaggagtttaaggaggtctgagtgcaatcattatcaataaccaacaacattggctaggcaatgagcaaacctagttttgaatccttggctattactaactacaacctcgggcaaaatgctttcagccttggcttctttaagtataaactgatatagaaagttgccagacacatagcatagagtgtggaaatgtttgggtcaaggtatgtatgctcttaattccataataaaggtttgatggatggtgttctttagttcaatggtagagcatttgcttagagtgtgcgtgaccctgagtttgatccctagcaccacaaaccaccattgttcatatatctgccatctcaggcttggcacttttaaatcccgtttgtcttgcctatattgtcctctctagaagtaaccatctcaactttacttcagcctactcaaatctaagctactaatgtcagcttctctcccataagaacaatcagcttccttccgtgttccagtaacactttcacttggatagctcaccaagatgcagagggtcccgcgttcattgcgtgagtattatcactttcatggtcctactgaccaaagaccagtcactgccatgatttacatacacttaaaggacattagctgatcgggccacagtaatattagaaccaaactctctgatgcagcctgcagctgagaacggactaaaccaaaccttccttagcgtcccaagaaagagcaagcactaagtccagacgtcaagttcgatgggcaagagatgaccatttatttatctagggcttggggagcttcgggttgcggcgactcccgggaagatagacccggggtctcccactcaagcaggtccaaccccggctaggaagacaccaaggatgcacgctccagcccgcagtccccctgaggcctagacaggctccacgccgtgactcagcccctggcgcccgccaacagccggccgtcctcccctcaccttggccagcttctcgcactcaggcaggcgctggtccaccgtggcgctgtagtccacttccatcttcacaatgcgcccatcggcccgctccgagccaccgtccgccatggtccctgcctaagagtcccctgctgtaccccaggttcggccaccactcgtcactcgcaccggaagtcgcccgctcatccactcaggcagtgcgtcggaagcccgcgggaaggaccccgtgaggccctcgccagtcaggcagtgctgcagacagccctggaggcggggcgtatggcgcaggggcaggcccaagaatgggcggggttttgtgagggcggggctttgggggactccagtctcctcgcccaagctaggttctaggcgtccgtgtctgaggggggcaaatgtgacacagcagaacatctcacgtatttttttttttttttttacctcttctacgtcgaaaacccatttaccagaaccgtcggtgagcacttgatttttcttcgtcctcggtgttcccatttttaaatgaggaggctaaaactgacccttaagacaaaaaagttctaaggtttcctctgcattatctatgagattgacttttaattgcgcctaaaaaaaggggggggtgtgtggcagacagcgcagctcagtaatatatacatatttttttttaattaggtattttcctcgtttacatttccaatgctatccccaaaagtcccccatacccacccccccaatcccctacccacccactccccctttttggccctggcgttcccctgtactggggcatataaaatttgcaagtccaaagggcctctctttccagtgatggctgactaggccatcttttgatacatacgcagctagagacaagagctccggggtactggttagttcatattgttgttccacatatagggttgcagttccctttagctccttgggtactttctctagctcctccattggcggccgtgtgacccatccaatagctgactgtgagcatccacttctgtgtttgctaggccccgggcagctcagtaatataacaatcagtgtttttgtgtttccacacaatctgccgtgccgataacaagaatgcctaagacaactcagatcacgtctctgagaaaatagcaattctttaccattatcatttttgcatgtacacgcatgtggaggtcaggggacagagtctaggagtcagtcttgcttttcaccatgtggagcctggagattgaactcaggtcttcaagattggcaacaggcacctctaccagctaagccattaccatggcctgaaaattgctattttaaaggcctgtacaagttttatcacctataccctctgaattgctatgacatagcatagaaatcataaaaaaacaaaacaaaacaaaaaacaaaaacctttcagagagccaggcttggtgatccatgtcttttttttttttctttaagatttatttattcattatatgtaagtacactgtagctgtcttcagacactcgagaagagagagtcagatctcgttatggatggttgtgagccatcatgtggttgctgggatttgaactcagtacctttggaagagcagtcagtgctcttaaccactaagccatctctcctgcccctgatccatgtatatttaaccccagtcctcactcgagaggcagaggtgggtagatttctgtgaatttgaggccatcctggtctatgtagtaagttacaggccagccaaagctacatagtgagaccctgtctaaaaactacaaaacagggctggagagatggcttagcaattaagagcactgactgttcttccagaggtcttgagtttaattcccatcaaccacatggtggctcacaaccatctgtaacaggatcctatgccctcttctggtgtgtctgaagacagcaaaagtgtactcatataaataaaaataaataaacctttttaaaaatgtacctgtgtaaaatacttgtttctgtagattgtctacttttaaggcaattagagaaacttttgggtttttaaaaagtaatgtgtgtgtatataaacatacacacatatacacacacatgaatctgtgtatctgctatagagagcaagagggaaactgggaaccatagaaaagagattgggctttctccccagcctctcctttttgtgggtatacaatctctttctagctcagcagttcttaactagtgcgtcatgacctctttggggtggcatgtcagatatcctgcatatcagacatttacattacaaaaagaaaagaaaagaaagaaagaaagaagaaatagcaatgaaaataatgttatggttggggctcaccacagcacaaggaactgtgtgttaaagaactgcagcattaggaaggttgagaaccacagttctagcttctagctctctctattgcatacactttttaggtctcatctaagatgaccacttcatttcaaaatccttaatttggtcacatctccaaagatcctgtacaaagcaacattttcaggttctcagagctggaacttgatatctttggaggtcagtgttgggtttatcacagtcatttaattttttttaaagatttatttatttatttagaagacactgtagctgtcttcagacacaccagaagagggcatcagatctcattacagatggctgtgagccaccatgtggttgctgggatttgaactcaacgaccttcagaagagcagtctacacttttaactgctgagccatctctccagcccccatttaattttttaaaatttaaacattattattattatttttttttttttttggttttttgaggcagggtttctctgtcctggaactcactttgtagaccaggctggtctcaaactcagaaatccaccagcccctgcctcccaagtgctgggagtaaaggcgtgcgccaccacacccggctagtaaatttcttttttatctgtatgagaatttgaccttcatttgtgtctgtgtatcacatgggtactggtgaccannnnnnnnnnnnnnnnnnnnnnnnnnnnnnnnnnnnnnnnnnnnnnnnnnnnnnnnnnnnnnnnnnnnnnnnnnnnnnnnnnnnnnnnnnnnnnnnnnnnnnnnnnnnnnnnnnnnnnnnnnnnnnnnnnnnnnnnnnnnnnnnnnnnnnnnnnnnnnnnnnnnnnnnnnnnnnnnnnnnnnnnnnnnnnnnnnnnnnnnnnnnnnnnnnnnnnnnnnnnnnnnnnnnnnnnnnnnnnnnnnnnnnnnnnnnnnnnnnnnnnnnnnnnnnnnnnnnnnnnnnnnnnnnnnnnnnnnnnnnnnnnnnnnnnnnnnnnnnnnnnnnnnnnnnnnnnnnnnnnnnnnnnnnnnnnnnnnnnnnnnnnnnnnnnnnnnnnnnnnnnnnnnnnnnnnnnnnnnnnnnnnnnnnnnnnnnnnnnnnnnnnnnnnnnnnnnnnnnnnnnnnnnnnnnnnnnnnnnnnnnnnnnnnnnnnnnnnnnnnnnnnnnnnnnnnnnnnnnnnnnnnnnnnnnnnnnnnnnnnnnnnnnnnnnnnnnnnnnnnnnnnnnnnnnnnnnnnnnnnnnnnnnnnnnnnnnnnnnnnnnnnnnnnnnnnnnnnnnnnnnnnnnnnnnnnnnnnnnnnnnnnnnnnnnnnnnnnnnnnnnnnnnnnnnnnnnnnnnnnnnnnnnnnnnnnnnnnnnnnnnnnnnnnnnnnnnnnnnnnnnnnnnnnnnnnnnnnnnnnnnnnnnnnnnnnnnnnnnnnnnnnnnnnnnnnnnnnnnnnnnnnnnnnnnnnnnnnnnnnnnnnnnnnnnnnnnnnnnnnnnnnnnnnnnnnnnnnnnnnnnnnnnnnnnnnnnnnnnnnnnnnnnnnnnnnnnnnnnnnnnnnnnnnnnnnnnnnnnnnnnnnnnnnnnnnnnnnnnnnnnnnnnnnnnnnnnnnnnnnnnnnnnnnnnnnnnnnnnnnnnnnnnnnnnnnnnnnnnnnnnnnnnnnnnnnnnnnnnnnnnnnnnnnnnnnnnnnnnnnnnnnnnnnnnnnnnnnnnnnnnnnnnnnnnnnnnnnnnnnnnnnnnnnnnnnnnnnnnnnnnnnnnnnnnnnnnnnnnnnnnnnnnnnnnnnnnnnnnnnnnnnnnnnnnnnnnnnnnnnnnnnnnnnnnnnnnnnnnnnnnnnnnnnnnnnnnnnnnnnnnnnnnnnnnnnnnnnnnnnnnnnnnnnnnnnnnnnnnnnnnnnnnnnnnnnnnnnnnnnnnnnnnnnnnnnnnnnnnnnnnnnnnnnnnnnnnnnnnnnnnnnnnnnnnnnnnnnnnnnnnnnnnnnnnnnnnnnnnnnnnnnnnnnnnnnnnnnnnnnnnnnnnnnnnnnnnnnnnnnnnnnnnnnnnnnnnnnnnnnnnnnnnnnnnnnnnnnnnnnnnnnnnnnnnnnnnnnnnnnnnnnnnnnnnnnnnnnnnnnnnnnnnnnnnnnnnnnnnnnnnnnnnnnnnnnnnnnnnnnnnnnnnnnnnnnnnnnnnnnnnnnnnnnnnnnnnnnnnnncccattacagatggtcatgagccaccatgtgggtgctgggaattgaactcaggacctctggaaaagcaagcagtcagtgctcttaaccactgagccatctttccagccctaaagttattacaggtgtgcctaaatgtgacttttccacatgtattggtggcctttggaggctagaagaggatgttagaggccccgaactggagatacaggcagttgggagccactcgatgtgagctctaagagcagaactggtacactttacaagagcaaatgtgcctagccatggagccatctctccaactcctaagggctatttttttctttttaaatcatcctctttcaaccctttctccttcccactgcagagctagatgaacccaggtctttgagcaggatgggagctctccagcccccgtcccacccaatataaccattttggacaagctgtccataccgagttcggagtaactagacatttgcataggatcgatgaatcttacactgattcttgtcgctccctcttcaacacagccaaatgctggatggtggaggatggatgcatttaatcagggagaccaagaatcctattcttacccttcagtgactcacgtaactgcgtgccatctgtcctgtgacacctttgctttccctgtgctccaccctcatttttacattcgatgacggataactgcagattttccatctttgatggaatttcttatcaaccaaccattatcgtgatagcatcgactttcataggcttaaaagaaacaagggtatggctagtggcatgtgcacagccagagctacaccgaaacacttgaaactctttcttgatttttttttttttttttttttttttttggtttttcgagacagggtttctctgtatagctctggctgtcctggaactcactctgtagaccaggctggcctcgaactcagaaatccacctgcctctgcctcccaagggccaggattaaaggagtgtgccaccactgacaggcctctctcttgatttttttgtttgtttgtttttttgctttttttgagacagggtttctctgtatagccctggctgtcctggagctcactttgtagaccaggctggcctcgaactcagaaatccacctgcctctgcctccggagtgctgggattaaaggcatgagccaccactcccggctcttgatttttaaagattatttgtatacagcatatatgtctgcaggccagaagagggcaccagatctcattacaaagcggagatgtggttgatgagaattgaactcaggacctctggaagagcagacagtgctcttaacctctgagccatctccagaaactcttggtgtccaaaaaaaaagccacaaaaacaaataaacaatagaaaaacaaaagaaaggaaggaaagaaggagggaggaaggaaggaagggagggaggtaaaattcttgtcattcacttgtggctcctgaaggcaggacttgaaacacttgcaagcaatcactttgaccagtagatggcaccctcttccccaagacaaatgagttatgaatgaactctccctaaccccagaccacgaaccatagtaatgaatactagccgcccctaattcccgcccagatcgtttttatgcctcctctcttcctcattccatctggtctacatgttcccatatgttccctgtagtattaatgttaacacaggcacctctagtattatatcctaaccaattcagcatattgttatcggtgttactttccataacagatggatagatagtcaatacttggctttaaaataatgtcatgaggccgtggatagcatgaaggattctccaagaaggcaataatgggatgagcagaaggatcaaagctgagaagtgaaggtcttctgaggccattggtgttaagaaatactcgtggactaaagtgggagagaaggtcttagagcctggagcctcctgttgtcaccaaaaggctttcaagttgctatggttaaagctgtgcttgcacactattagtgagaccggggaaataaggaagccaagtagaaagaaaaagacaatatactggggaaagtcaccttgtaatgtgaggtggaagaaaagtacagccaaaaaaaaaaaaaagaaaaaaaagaaaaaaaaaaaaagaaaaaaataatcaaaaacaaaacaaaaaaaaaagaaaaaaagaaaaaaaaaacaaaaaaaaagaaaagaaaagaaaagaaaaagaaaagtacagccagccagcagtgtctgtgggttccctgtcagtgcatccactgtcccacggatcaaaacatactcagaaaccactaatgtacggaacacatggcagatgtccttactctctgaacaatgcgatataacaactattcacatgccatgcacattacattagatagtattagcagtctagagataattggaaatacacagtaggaagccactgtgaagatgattaagtgccattctgctaaaaggaaaaaagaaaaaaaaatcatcttgggttctttttgtctcacaagcttccaattcaacactatcaggtcaaatttaatgatctaccttgaaggacggtggtagcctacacctttaattccagcacttgggaggcagaggcaggtaggtaggtctctgagttcaaggtcagtttggacttcaaagtgagttctaggacaaccagggctagacagagaaaccctgtctcaaaaacaaaacaaaacaaaatttctcagggtgtttggtttacctttaattagctgctgtaaatatttcagagccaactttgggaagcatttatctagaaaatagttttctttctttgtctctctttctttctttctttctttctttctttctttctttctttaccagaatataagctatgtttagggtgtcattttcctagcaggctggatcatgttccctgagctctaaacttgggtcatctggacaacattagccagagcccaccctcattatgttgattagtgacttattgagcatcattttaacatactataccattgaggcctgcagagtctgcattgcccaatgcaagctctatgggtgaatgtgggtctccagaactcacaaatgcacacacacacacacacacacacacacacacgtttgtgtgaacatatgcatctatgtttgagagccagtgatgtttacacattatcctcctataggcagtggatgcacttttttcctccatttttaggaaaacaagctaaaaaaaaaaaaaaaaaaaaaaaaaaacaaaccaaaaccgaatgccagacaaatgaaaaccagacttcagcagttacatgctgcttcctgagtaactaaagaatgtgcttcttgtggttaaaatgagagatctgtttaatatggatgaaataccaacaccccgggcatttttattgacatttcactgtgactttttgaacttaggagtgctgacacgaaaacctattctttctgctctgggaagcctgcagttgggattgcagagagccagggagaaagaggtagcaggcaatgcttctctctctctctctctctctctctctctctctctctctgtgtgtgtgtgtgtgtgtgtgtgtggttgcgagcgcgcacgcatttttactctgttttcaccaacactgctgcagaactccgccttgagagcatgttagaaaaacccattctaaaaccatcatttctcttgctccggccttgcttactccatcagagagaaaaaaatgttcgctgtgagcatttgtaaacacgcccccagccccaaagtcaaggggcactagtgcactttggaaacggtttccaaagcgactaagtagagagccctatggcacccaggttacatttgaaaacagatccaacgttgtaagagtccaggatagcttctttgcgattctctgttctctttgcgttagctgttctaggttctgggacagccctggcgtctggcagcagacgggagagacatgctgttttgtttaaatcctccacattctttgccatttccccattggccggatggggctaccctccccgccgcggccgctgctgatgtcagcctcgtcgctctcgctcctcccgcacccacctccctgccccaggcacactgcagctcggcgcggactctccagtcgcggcgaggtggctgcaaactcacgggcacgcacggcgctctcagagccgagggactcgggggaggggacgcgcgcaagccgctggcagccaaccgcctaggttgaagacacccggggcccagagcagggcagagccttggcggctgcggcttcccttttctctctcagctgagctccggagagactcggggactggccctaaaaaagagcaggaaatcttgtttaccgcccggggagaggagcccatcgagcctttgtttggaaagtcagcatcgcctgctcccgcggcaatgtgttcctggtgacattaacccacggtagacgggtaggagaaaaagggggctcgccaggttcagctctgctttcggaggaggatccagaggagacttttgtgcgtttgtttgaatttgtggaaatcccttttcctcctccttttgcctctcttgcccgccgccgggcatgtcctgatctggtggccgcgcctaccagcccggggctgctgatccgagctgtctcccgcgggtctccctccctcagtgcctgactttgcaataccgagagggctgatctctgcgaggaaggaggcgggggagtcacagacaccgggacccgaagcttgacatgctccggggcggaccggaggcagttaggagctgagcgcaccaccggggctgcttcgcttgccggttcccagcgtctttgccctcctctgggctccagccttgctcatctgttgggacgcccccttctttcccgaggtctgcggccggcaggaacatgctgctcaaggagtaccgaatctgcatgccgctcaccgtggacgaggtaggcaccgcgcccggcctcgtccgctccgggtccccagccgccaccactcggccggcgggtccactgcgtgcggcggggaaaccctggcgcccaaacctggaggctggagggggaggaggcaggggattcgctgttcccactcgtcaccccagcagaggaaaggcggcgtgggggtggggcgggggagtccaggtgagctcttcggggacatctagaatcagattcctggggaccacaatgcgtcacagggagctgttgcgccccctccctccaattaagcaaatgcacagagtataagagcccaagcatgctctgcagccggagtatcggggtaaccggccgtggtggtagccactgtccccatgtcctctttacaaggtgggcttgcagggacaaattccgcgcgggtgggatctgcagaccagagtcccgccttgggggcatgtgggaggcctggagagggtccgtttagaacccgacttcttgtcgcctccggtctaggcgctggctcctgcccagccgagcatccaggctccctccgcgatctggattgtcctttgctgaccgcctggctcggaaactttctgcgtgtctcgttccttccgcggcggggagcgtggtcttaggaagagccccagtggtggggcctgcggcgcggccaccggagggcgctccaggccgtcaggccgggccctcctggctctgagtatcggggctgcagggtggggggctccccgctcaagggctcggcctccacgcgcaggtcagcttgcattcttccgattccttctccgccccccgtcccccctatccgcgagctccgccattgaggaaacagtgactcagtgagggtcactccggcccgggcttccttttcgttcccctttctccccacctctttggatatttcataagtgctttgcgtctgtccagggacacacagccagaacatgaagccaatcaaggcaatttgggaaagactcctgtggtttgatgtggcaacaaatgaaatcagcgatccacgacgtatttgtatttaaaaccggtgcatttaatctatcagacatgtgatctactcactactttgtgaaaggggccttgtgcttttgtgttactcagactatgtctggctccctgcccccccccccacctcccagggtggtggtggtgggggcaatcttccttctgcatctggcgccagtgttaaggtgagaccctaggacaatccaaggtaggatcaaagtagcctgaagtttacaaaacacttgacactctacactggctgccaaagaccgagagggatagcttagccatgcccctctccccacccccagccttatcaacgagcgtttctggggtggcagcattttgaactaggtcttaaatggtagttaggtgccttatcaatggggaagcagcatacagctttgtggagaatgaagaaaggcaaatgaatgggattggacgtgcacacacacacccctccctggtgctggtgttttgtggacatgctgtcttcgcacctctgggactgctgagcaggaccagggcaacctggaggtgtccgtatgcttccacttcatttcctgctttgactgtggttaatagataggactgtgccatcctagggcgccaatgggactcagtcaaatattgaggcaggttctttctatgtagtcctggctgtcctacaactcactatctagcccggactggcttcgaactcacagagatctgtctgctgagtttaagtgtatgtcaccgggctcagccattcttccatgctaacatctgttcattatcctggttggtttccttcagatactttgttaagcacagggcaggcatctcccccccnnnnnnnnnnnnnnnnnnnnnnnnnnnnnnnnnnnnnnnnnnnnnnnnnnnnnnnnnnnnnnnnnnnnnnnnnnnnnnnnnnnnnnnnnnctctctctctcttactttctctctctctttctttctttctttctttctttctttctttctttctttctttctttctttctttctttctctttctttctacagggtttctctgtagccttgactgacctcaaactcagagatccacctgactctgctgcctctcacgtgctgggatcaaaggagtgtgctgccacccctgtctagaatgacttttcttaatcggccaaggaagccaggctctacctataggataattataaatcctgcacgtgaaacctgtttagactaaagtaagtgcgattcccatttctatgaggtcatattctgatgtttaacttttatttttatttatttttttattatgtactcctttgtggttctgggggttgaacatggccttgagcaggggaaacaactttctgcctctgagctacatcctcagcctgaggtcttattgtgaaattgttctctgctttgtcagtttagattggaggtctcagatagaaaaaaattctatctgaatttttaaactgtagcttaccccagagcttctcccatcccatggtggtgccctgctagctggccttaatactcagtgctggggagtaactgaagtgtttggtagcagaaggtggttcctgcagattaagtggtctctggtagctcaacattggcttcagcttctggctccctttggacttggtgtaacctgtgtggaccttctggtgcttgcttctgattaactttgcacgttaattagcactcactggattttgccaaggaagtaaatgcccgagttttggggagtccatgtctggtctctgtgtctttcccttctcccctgactctacatggcctctggtctctagtctctggggtgtaatggctgctccactgataaatactaataatcccagcgcttgggaggtggaggctggagagattttagaaactttaaggtcatcctcagctataaagtaagtttgaagtcagtcatgaaacttttttggttgctctcccctcccccacaaaacaaggttaaatgctgtattccaggctgcgcaactagttaatagccaagccaggaggagcgtgctggtaatgcttttgtttgtttttcctttccctgagctccacagtgtttgatccaggaaaaggaaaatcatttcttgaaagcagatacagtcagcactgtcatcgaaataaaaaaaaaaaaaaaccagggtcccttgaattgttgcagatagcattgacttctactgtctctctctctcataaaatgttccccagttccaggaaagagaacagctccgcgagacggagcaaatagagtggagcttctctctagagcagggtgttaatggtatgcttgtaggtgcttcagtggaagaaagcttgcagagcaagattgaagccctgggtttgcaacacaacacacacacacacacacacacacacacacacacacacacacacacacacacacggttcgagaggagggggggattgagagtttctgaataaggaatttaaaaagtaacattccatggattagttgagattatatatgctggtgtatatgttgaagccaaagccagagaacaaccttgggtggcctttctcagatcaccggtttttttttttttttttttttttatatgaggccttacacagtcctgggactatttgccaagtcagctaggctggctgactggtgagccccaaagatctgcctgtttcttcctctgtgctggggagtcaccatactttcttccacctcctcttcttcctcctcctcctccttcctcttcttcctcctctgttttctccccacaaggctctggggctggaactcagcccaatcaccacattgctggcagaactctctcaggccttctatgatcaaacaaaattgcatttatttgtgtgtgtgtgtgtttgccatgtatgtggaggtccagataacttatttttttttaaagatttatttatttattatatgtaagtacactgtagctgtcttcagacacaccagaagagggcatcagatctcattacgggtggttgtgagccaccatgtggttgctgggatttgaacttctgacctttggaagagcagtcgggtgctcttacccactgagccatctcaccagcccccccagataacttataggagtagggtttctccttattgcaagtgggtcctgaggatagagctcagatcacccggcttggtggcaaagtagcgttgtatgagactttccttagcccttcacggattaactttaattaagaacaatgacaagctaacaaaacagatagaaaacatcactggggttaaatacagtcatctttgagtcaagtgaaagcctgtgggaaagttgttaaagggggggggggcgcatctggattctagaattttagacttggaagagctagttaaattgtctgtagtcttgttttctagagggttccaggcctgtagagggcacattcttttgcttgcccaatagctagcgtagaggctgggctggaacagggcttctgatgtctggtgtgaactctgtttcgtgggtgctgtgagggctacagtttctctgtgatctctgttggtagcagatgttattatgttatattattatgcctcgtgtaggtgtacagtgtgtatactgggtcttccctagttgaaggtagcatggagacttagaccttgtatctacccaggggacactgaagcatagtccctgttagagcctactgggagtgtctagggtgaatgaatgttcacttagtatttacgaagcccagggataagtctctagcacctaaacacaaacaaacaaacaaacaaacaaataaacattattacctgggtgtgatgacccatacctataatccttgtaccaggcaggctgagactggagaattaagagttcaaggctcttgagtgaagaacacttgttcttgcagaggacttgggttcgggttcggtttccagcatccctgttgtttttttattaccatccatgattccagttccaggggctttagtgccttcctctaacctctgagggcaccaggcacacaggcatgcaaaccaaaagcaaaactctcggtacatacaaataaataaataaatatatatataagtttaaagccagcctgggctacttagactccatctaaataaataaatgaatcaataaatacacaaataaaaagataagtgtttcccagagactagagcccatccgaaagagaatgcaaggtaggaattttaggtttttatttaaaaaacaaaattatctttgaaaacaaaaattttggactgccctcatattgatgtgcattcaggtagggatttatttgcagtctctaggggtttgctgcaggatgaagaaaaacagaaacattgtctcctcatcaaggattgaagaaaaggaagagtgacagccgaggacacaggatgtcattgtgtgctctgctctggtggagagccagcactctacccaggagcatccggccccaggagagttcccctgcccatgtttctgagaatcacgggagctgggtaggccactcaggaagggtggggatggcgatgctagggcgggggtcattttcccgtctctcttcctccctccattggaaactgatggagtgtttctgcaagcacctgcaggccttgaaggaaagaaggtttttttgctgttgtttggttttgttttgttttgttttgtttttttgagacagggtttctctttgtagccttggctgtcctggaacttgctctgtggactaggctaccatggaactcacagagacccacctgcctgtgcctcctgagtgctgatattaaaggtctaggaagacgtgtttttttttttttttttttttttttttttttttttgggtttttcgagacagggtttctctgtgcagccctggctgtcctggaactcattctgtagaccaggctggcctcgaactcagaaatccgcttgcctctgcctcccgagtgctgtgattaaaagcgtgcgccaccacgcccggcctggaagacgtcttaatagctgtgtattgtataaagtggaaggaacccttgagtatgaaggctaaagactcctttttaattttttgactgttcctagttgagaggagccaaggccgggaccatgagtttgatcttactgatctcagtagctccctgtgccaggatcgctcacaggcagtgaacgatgttcacgaagctaccccgctctctagcacgcagagagtcttgctcccgagtgccatggactgttaatggatgactgcaagctctcaccactaatggactagacaaggaacagacacaggcctgctggctggggccaggaagttgactctgtgcgggaaaggacgctgcccttccccagtcatttaaggggacacctgtcatgtggagcagattcccggccttgggggcggggtgggggagcatacgttcttaacaaaagctagttgatgtggtagtttaattattcactttttttttttcttcatgtggttgttgggaattgaacttttaagacctctgctcactcaggttaaccctgctctcttcagttggccccgttcctcagtccctgtttgctctggcccaaagatttatctattattatattattatataagtacactgtagcagacttcagacacaccagaagagggcgtaagatctcattatgggtgattgtgagccaccatgcagttgctgggatttgaactccggacctttggaagagcagtcagccctaattattcactttcactatgaatagaaagatagtaagctggtagttggagattgttgttggggtcttaaactcaaggacttgagcatgctagaccaggtatttttgtcctcagctctaaggctcttctttttttgttttggtttttcgagacagggtttctctgtatagccctggctgtcctggaactcactttgtagaccaggctggcctcaaactcagaaatctgcctgcctctgcctcccaagtgctgggattaaaggtgtgagccaccaccacccggcctaaggctcttttaaaaaaaaaaaaagttatttttattttatttgtgtaaatgttttcctgcctgaacctatgtgtgacatatgatggcactgaccgtggaggccagcagagggcaccaggtctcctaggactggcatttccacctggttgtgagcttttgggtagatgctgggaaccaaagctcttgcctggcaagagcaggtagtgctctttccttgagtatctctccagcctcctcagttggaccgtagaaggccaggttccctgcctggcaggcctggaggtcctgttttctgttagctagaggtctgaatagtttaggcaactctaaactttgaaaaatagataacagctttgcccctctcttgataaaaaagggtgagttctagacctcacctaactgacatgtgaagcctggaaggctctgggtgtgacgaattccagcccatgggagatgaaaagggaaattttatattacaacaccaggcctcctagactcctcttggaaactgggaattttgtgggattcccagtggagatttttaattttttaaattttttttttttttttaaattttcgagacagggtttctctgtatagcccaagctgtcctggaactcactttgtagaccagactggcctcgaactcagaaatccgcctgcctctgccttccgagtgctgggattaaaggcgtgcaccaccatgcccagcttaatttttttttttttttttttttttgtatgtaggctcttaggcagaggaaactcaagtgtatcattcatactatgagctgcaaagttggtcatctggaaaatagaaagtcgtttgaaaaatttttaattatggaaaatgtagctctcacaaagagggccccagcacggctggcatttgtaatgaagctcagtgaaaatggaccttaggatggacctgtggccaaccctttggttcctggtcatcccatctaagatagaagctagccctctcaggctggggatacggtgaggtagggagggtttttgcctagagtgcaatactttttatattaaaagaagcttgagaccggagagatggctcaagggttgagcacttgctattcttacaaaaaggatgactgaggttctgttcctactgttgtgatctttgggtggcaccagaaagaccacaccaggccaaacagttccacttgaggtttattaagggagaagggcacggtggtagggaaaagagaagaggggggagagaattcagaggagtcttccttttatatatggatggtgacgtagccacaggtaaaggtgggaggtgagccaagtggattctgggaatatggtagctgttgccttggcaacaggtgtgctggtcgtgttgtcacgtaggtgtggtgtcactgatttcagaggtcctgagaccaacacctagcaccctacatgggagtggaggggagacaccaatatgtgtaactcccatcatagaagattggagcccacttctggcccttgggcacacacaagacacatacactcacacagacacatatctatgaagaaacgcaaaacaacaaccggcaaacaaacaaatcctaacaccaccaaacaatattggagacaggattgccctttttggccctggctggcctagaatcactttgtagagtcagctggcttctaactcactgatctaccttcctctgcctctcaggtactgggataaaggcgtgtgcccctctacctcgaaaaataatcttcaaaggttagaaaaaaaaaataacagggtgtagtggcatatgtcccagcatccacaggggcaggcagtttcaggacagcctggtctacatagtgagtttcaggacagccagagttatatagtaagaacctgtctcaaattgtgctccccccccctttttttttcccaaaaagaattatcagaaattcaatagcttaagacacctgggttggggcttgagagatggctcagtggttaagagcactgactgttcttcctgaggtcccgagttcaaatcccagcaaccacatgttggctcacaaccatctgtaatgggatccaatgccctcttctggtacatctgaagacgttgactgtgtactcacatatataaagcaaatcttatagcagcatgtacaaactaaataagaatcctgggagacagctggggaaggttatcaaatacgttcaaatacaagtctaagtgtcaaagtacaaaaatgtgtctaaatacaagtcagggtgtgacttgattggtccaatgctcagggtcttgggaggttgaagctcaatgatgtcttggctcccttctttctggaatgctcgcgtggttgtgacaaaacaaagtcctttgaagttggagaattaaggtccctactttctgcatggcttttgaataaagacccacccctagaggccactttccatctcctcccatgtcacacattttccacatggcagttggttctttcaaatcaatggtaagtgtctgcttcaagttttaatctctcggcgtttttatctctgacttttgggactatttgcaaagaaacccactgcttgatccgggcccaccttattcaagggcagaggatcatacaatacagagtggtgccattctgcctagcatggcaatggacttgattgaaagacccccttggaggagagtaggagcttcgagctaattaaatttagttatgcaaagttgcaggtcggtatttggaccataaatgaaagtattcatttcacagatacattcttggcctcctgctgggtgcccagtgcttgggaacagtgctgcaagcaaggcagacacaatcactccctttcgggagctggggaaacaggacacactggaggagttcgctaacacttagaaaccagaactggggatgtaggctaagcacggagttcttgcttaacgtgaacaggatcctgcgacagaaacagcagaggaacaattggattgccttggaaaatacaaatcagtaaaacttttaaaataatggttctagagacagtctcagctggacgtggtggcacacgcttttgatcccaacacttggaaggcagaggcaggcggatttctgagttcaaggccagcctggtctacagagtgagttccaggacagccaaggatatacagagaaatcctgtctcaaaaaaaaaaaagagagagagagagagatggtttcagggcatggctcagtgggtaaaaacactttatgcacaagcatgaggacctgaatttgaagctcaagctggacaggcctatggctcacactttaaatcccagcaattaggaggcagaagcaggtagatctctataagttcaaggacagcctggtctatagagtgagttccaggacagccagggctacacagagaaactctattttgaatgaatgaatgaatgaacgaatgaatgattaaataaaagctggacacagaacaagtgtctggaggcagcttgtttggcctatgccacagaaaaacaatagaagctccctggttcttacaggatagaaggtggcgtgtgccctctggtgtcctaagatctgcggtggtggctggtgtgcaccagcatttacacacacgtgcacagaatgcagacacacccagagggtggaaaaacgttaagaaggtagttatagagttatttgagcaccaacttcagagaacgccaccagcagaaagttctgaactggaaattatgagttatagctcctgtcctccaggaaatggttatagctctctcaggtctagacagctttccagaaaatcatgtcctcttctgacgcagtgtgggaaaaagtgtacatggcaggtttgaaccaagtggctttgacttaggtcagagctagggagggaaatacattttttgctgagacgtggacccagagctggccacagggctgcaggacactgcagatctttgaggttctagttcacagggaccacccctcagagggactggagcacttggaaccctgggcctttctttgatacgaatcctttgccaagactgtcaggtgaggtgaacccagccttgctgctcagaagttgggctcactcagaaagccagtttttggtggcagtaatgtctgggcccttcatcttctctctaggacggcagaatcccctcgggctaggctgggcacatcgctaagaactcatatggggagggcggaaggccagaatgttctgtcttggctgcgggctatatacatgataatgataaaggaaggagtctggggtcactcaccacttcctggctggctgcctgagcagcagcatcatgcaatgcattttgttgacttagaaagatgaagtcagagcttaccaaggctccttaacagcgagtgttaaagtgactcactgtcatttcttagcacccaatacaagagcctgcccttagaaatgcctcttaagacgagcgggagtggagaggcctacctctaaacgggtggccagcgtacgttctcattagatcgtcatctcatgactcactccaattctattgattgatggattgggtttccctagatcggccttgaacccactatccccttagcctcctaagtgttgggatggcaggctgaatcatcacagcctggtgtgtgtgtgtggggggggggtagagtagaggagggcattggtgtcctttatcactctcccttattcccttgagacagtctcacactcaatctggagctagccagcaaaacccgctcatctccatccctgcaggtggttctgaggtggcaggcagatccgctgggttggctctttacacaggtgctggagattcgaacttatgtcctcagccctgtttttcttttctttattatttattccttccccccttttaagttcagctgaagcatgactgtctagaactccagttgttcccaagcacagcaaaatcatcagctcctttgatcccccgagcattctatctgaccatcttagggtggtgttgctatcgcctggctgaatcaccctgcctaagagtgcccaaacaaacgtaatttgatgacaccctataataatgttatttaagcacttaacctaagtagctaatctccaaagactgctccctggccccacattcactctctctatttctctgtctctctctttcacacacacataaacacacatacatacacagagacacatacacacattcacttatacaggcatgtaatgctaatagacacagaggcatactcactcaaacacacagacgcatatttggaggcacacggacatatgttgcaggacattttacctattgcactgtggaccctgagattgtgttatttactgaaaaattgcttcccgttatggtgtgactcagccttgctgaatgacacaccctttgtgcacacctttaaaatcccaaacaatgaaggtgaagttagtttgtagaaggaagcacccaggtttgaaagtgatgtctaattgagtggcagacaaagtgataagccagggaaggatttcacagaatgggatctgtccaactctcgtgagaagagagaggaagaggaaaaggagctgtacaggcagagaaaagagaaggaagcagcttttaccaggatggttttatggagaaaggctgaagagagaacaaactaggcacaagtggaggcagaacaagccagagagagagaaggagccagaagattagaacagattgccaaagttagtatgaggccaagcagaaggagacgccaagagaagccagatcgaatcagctagggtgaagagttttgagccagaagagctcggttgaccagccttccagggttcagaaagaacaagaaacggtgagcttatttattcaacagttagactcagaagctgaaaatgtactaggcctagattagattgtacgaagactagaagctcccagcactagtaagcctcggagatggtaattacttcaggtgaataacatagtttttacatacatgttcacacatatgtttatacacagacacaaatgagaaacacacagactgacactcaggcacatacatacagagacatacacattcacacccaccacgcacacagagacgaatacagatacacacactctcacagataccattatgctctgattatattagttatatgaaggcctcattctgaagtttctaagtctttgtatttttgcactgggaaaaacacgaatcttgatgcttttgttttaatttgtttgtttttcccctcaagacagggtttctctgaatagtcctggttcttctagaactctttgtagaccagactgtcctcaaactcagagatcttcctgcttctgcttcccaaggcatgtgtggcgctactgccaggctgtcttcatgcttatttaaaagaaatgaatcaacggaagagcggaaaatcacttttaaaaaaaatatttatttatttgttatgtgtaagtacactgtagctgtcttcagacactccagaagtaggcatcagatttcgtgatggatggttgtgagccaccatgtggttgctgggatttgaactcaggacctttggaagagcagtcggcactcttaaccgttgagccatctcaccagcccggaaaatcacttttaacttaagttgtttttgggttttgttgttgttgttgttgtttttgttttgttttttgttttcgagacagggtttctctgtgtagccctggctgtcctggaactcactttgtagaccaggctggcctcgaactcagaaatccacctgcttctgcctcccgagtgctgggattaaaggcgtgcgccaccactgcccagctttaacttaagttttactataattaaatagtttaaaccctcactgggtcttttatttatttttcaattttttgagacagggtggatatctggctagctagggtggccttgaactcactgagatcctcctgcctctgccttctaagcgctggaccaggaccatcactgggtcttattttctggattctttatatttcctggcatctctcctgaattttccagtttaagtttataattaaactataattacgtttataactatataattaaaaattatattaaaagactttccctttctcctctgctggggcaagctctccaccacagagggctacagttccaggcctcacccccctcgttaatttttgagactggaacttgggaatgtgtgctatgtatttccaggctgatcttgacatttcagtcctcctgcttgagccaccctggggcagggacgtcagtctttccacctctgttaattgatgcttcggatggcaaagtctcactatctctttgtctctggccaagggtttgtaactttgtacgacccacacagacagtgtatagatcgtaatatagcccgtgattgagtcttgtacccaagcttcctagaaagtctcctgtaggactgtacagtccctagagagcctggggctgcacaccctctgtttatctccgccatctccgttttcctgtctgacatatacattgtgtaagcgctgtctcctggctgtcaactcctaggaaggaactagcctgtggcaggagggcttggtggggtgtggcttgcttgtagtttacttaaatagttagtttttttaatcttctgccttctcgtacacacctgtagtgtattttgagcttgctccgcccactattattctccttccccatcccattgagcctcttgccaacaagtccgtcccgtccccgttcccccccccccaccaccacttctaagcctttttcctaatgcctgcaggagcagggatggagggctatttacctgaactaagtagggcacattaccagtgcctgcgccagggatgactgtgactctcctccctctgcaacaacccgaaactcctccgggagctccatatgggcccctcccccaccattctcacaggttcacctgctctcagctagctctctgagcgagtatgttctttgttgctgacctgacaatagttttgactgtatgtttgcgggttagatgcttcacagaggtagcacgggagactctgagggaaacggagtgatttacagatatgctcagggctctcgttttgatctcttccaccccccacttcccaaaccaaacagccagatggggcaagaggatctctgactttgaggacagccagagctacacagtgaaacacagtgtctcaaaaaacaaaaacaaatctaccaccaccaccaccaccaccaccaccaccaccaccaccaccaccaccaccaccaccaccaccacctacaaaagtattttggaaccggagagatggctcagcagttgagagcactgactgctcttccagaggacctgggttcaattcccagcacccacatggcagctcgcaactgtctctaaccccaagatcgacaccctcacagacatacacacagacaaaacaccagtgtacataaaataaaagcaattttaaaaaaggattttgattgattttttttttcaaggcctgcctggactacagagcaagatttggtcccataaagggggagacagggccacttaatcaacatgagcattaagcttttccttctgaacaactttaataatgaatcatactctttttgaaaagaacttttgtcgtttgttcttttgtaagagaaccacccctacgctcctgggaatcattccttttaatggcagcagaagcctttggctttcagaggtatcatctgcggggctgggaactccggagcacctgtgtcttgatggaaattagctgctgctgaaaatagcgctgggaagagacaggccacgccaggcttctggaaacgtcaggcccttcacctgcaagcaagcagactgggaggtctgagggctcagaggggatcaaaatgcacctctcagaagttcgtgtttaccaccccagagatgatattcagcagagtttcaggcatgtgccacccctcttccggtaccggggattgaacctacgacctcatgtgtacaaggctggatctatatagatatggctgatgtacacactctaccaccgagccccagctccagccctgactcattgttcttagcattgcctcctaaaacagtttacaaccgccaggcagtggtggcgcatgcctttaatcccagcacttgggaggcagaggcaggcagatctcaagaccaacttggtctacagagtgagttccaggacagccagggctccacagagaaagaaaccctgtctcaaagcaaaatcaacaaatacctgggcatgccactgtgtgtattggggtattgaggggggccgggcagtggtggaagcgggaggactcccaggcttgctggcctccagcacaaatccaggttcagtgagagaccctgtctcaggggaatgaatggaatgaatgaaagagatgaagattgatggagcagaacacctgacatcttcctcaggcctctctgctcgggtgatgcatcggtacacgcatcctcacatacccgagtgcttacacacacacaccccaacccccgcagcacacacaaatatccagggtttacacttacagctaaggattgtgtacctcattttatgttaagaaatttatttcagtagtgctgatagccaaatcaggtatccatggacgttttccgttttctttttaacattttttttttttttgagtttgtctggaatgcactacaacaacagactggcctcaaacctacagagctctccctgcttctcccatccagactggagtcatgtaccaccgagcttagctatcttcattgtttttagtggcatgggtggacagcaaacatgtgccactataacaaaatgcttgaggcaaccgtcttaaagagcagaaaagtttattttggctccatgggaagagaagtatgtgttcttgactgtggagccatctctccagccccccagttagtgacctttgccaaatcgctactgtctcaattcagagaaactgctatattatcctcacacagggaaaaaaaagtgtattggctttaaaacacttaactaagacaaaaaaaaatcccatgaatttttgacgcattgttactgctaaagtggcgggcagaatatttgattagagatagtgcttttactcctgtacaaggtagaaacagactttaattggactccttttctcagtgaggaagtacggttaaaatgttaccttattttcttagaattttataaatgtttaacccaggagaaaaaaagtaattcaagtcagtataatggcttattaatacatgaacattgtaacattttccttcttgtcattcttaaggatgtctacagatcgggctcttggttcactctccaaccatcgaagctcgctcgctaggcttttattttatttgatatcttcaaacggtatcttgatcatgctcctttccctcccccagttcctcctggctcctcctcacctccccacccacccaacttcaagtttcctctccctttagctctttcaaaacaaaaaaacaggagaaaacgaaagagaaaatcaaaaccaacaccagcaacaattaaaaaaaaaaacccagtaagataaaccactacaaaaaaaaaagtggagtctgttttgtgtcagccaactagtcctgggcggtggggcctgccctggagtgtgggggacatacccagtgacactccatggagaaaacggggtgtttccgtttcccagctttactatcttctccatcaccatcttctgcatcggcatcagcatcatctattttgtcggtactgaggattgaatccagcgacttgtacccaccactgagccacacccggagcccctcattagatattacaattttcattacatcttactgtagttactttattgtatgtatatgtttgaggatcagaggacaacttgcaggacctggttctcctcttgcagcttgtgggtccccaggattggatttaggttgctgagcttgggggtaggcgcccttactcaccaagcagcccagccatcttgccaaccctcttccgcctcctccccgtctttatttttgtgacacagagcctaactttgttttttgggctggttttgtctgtgcggaccttggctggtctggaatttgccgtgtagaccctgctgacctcaaactcactgagatctgcccgtccctgcctcctgggattaaaggtgtgcaccagcgtgtgttctggctgctcttgagctccagggcttatgagctgtcctccctagcctcccaagtagccaggactacaggtgatatgtatgggtcacacacatggagttgtcctttcgtccatctggtggccactgttgttctattgcttggaccgctggtttttctgaagactgcagttgccagatgagagaaccttgtgcttgagccagcccccactgggcgcgtgtctcctggaatgtgtgattcgctggggtcagtggttctctttcacaggaaggttttgctgagtttgccctgttctgaaatgaccacatacatacacaccaccttctttcacgatccccgtttgctgagtgtggttttctcagtactcaaagcacgcttcgaaaatagccctttagcttaatgacatgggtgagagataaggaagtggttatctaaccctcccacgggcagaaagcttggcaacttgagttgcttttggttactggggcatgagttacaccttgtacgctggagacttagccccagtctattgaagatgggggcaaatctttttttattccccccactgaacttttggtttttgtttttgttttgtttttcgagacagggtttctctgtattgccctggctgtcctagaactcactctgtagaccaggctggcctcgaactcagaaatccgcctgcctctgcctcccaagtgctgggattaaaggtgtgtaccaccatgtccggcagtttttttttttttttccttaatgattattattttaaagtttatttttgttttatggctacaagtattttgcctgcatatgtgtttgtgcaccactttggtggctgctacctatggaggtcagaagagggcattggatcagctggcaatgaagttacagacggttcgtgggcctccatctgggtcctagacattgaacctgggtcctctgtaagaatcacaagtgctcttaactgctgagctgcttctaccacccacctgtggatttttgtttgtttgtttgtttttgtttggtttggttttgtttcttgctctgtagcccaccttggtctagaactttgtcacctaggctggcctcacgcttcctgcagtcctccagtctcagagctcctgagtgctcgattacaggtgtgacctaccacacctggcttgaaagcctattatttttggttaggttgttttccctctcttataaaggcacagtgtccaaatgaaaagtgcacagagtcacgattcaattgttcacgtcttttggattgtgtgtgacggaaatttggacatagcccagtgtcattacggttttggacaggatgacttacggtctgtagatatggttgtacggagatgtgttttcttgccaagatctggctgaaaaagagcttgctggttgctttttgtgtttaaaaaaataataattaggctattagttgtctaaatggagtaatccccctttggctcctcaagaaaagcacttctgagatgggtgagtgtatttaaaattagccattacttacagtggttcggcctctttctcacactccctctggagtttgtgtctctcccctccctcctcttttctccccctgtccccatctctccatcttagtgttgattctgtctgtcagaatcagtgtttatttttattcatttaatttagtttagtttttattttatttttttggtgggcatatgagacaggatctctatatgttgcacggggttaaccctgaactctctctatagcccaggctggcattcaattcagtggagatgttgctagctcacgaaccggagttacagacatctgtaagcaggtgctgggaactgaacctagcttccctgcaagagctgcaagcaagtgttcttgactgccgagtcatctctctgacccagccattttattttttaaagataagaggtcctcacaggttctgagatcaaaagcagccaaatcggtgaatatgcttcacatattcatctatttttcatctgtagagtggctttctcctcagggttgtcctggcctacagtctccgctggagacgcgggcagaggaagagcttaccccaagggccttctaggcctttccttttaaactgagtacaaagtaaaaagatacagcagggcggggcggagtggagggggtgcgtttctgggctcatcaactgcagctttggggcaggagctttgttgctccaagctaggctcagatccgccctgggtgtttcttgggatcggggtagggataggacctgtccaccccagctacagactggaagccctgcctgagacacccgacacgcctgtgggtgcggctcatccccagcagggtagtctcttgctttctgcttttgttggcgctttttggatggctaatcagccacaccttgcaatgctgacactaagagtcctgctaattgcctcctcccacagaaagaatcaccccagaagagactcatcattcctaagtttggtttcttctgttcttgttgtcttcttccactgaacaccctgagccagctaagctctccttagctgggactttcagctaagttgtactaggctgtactaggcaagaagttatctccgcagatgaaatgagccagttcaagtcaaattaaagtaaaacggcagcagttttattgggggcagctctcatgggagttcaccagctacacaggagtggggggggggagtcagtgaaattgcggtgcaaagggagataggagaagagagaggatgggtacagagggagaagagagaggcagagagagaccaaaatgtctggattatttagggaagacctgagagaggggtatgccagccatgtcctgtaacaggtcagagctgagggatgctgggagaacctggagccaggtccactttggtatgttaaatatgcaactcagctgcttgtcccaggtctgaaacccaacctcagggtgcagagtagacaggtgactagtagacccgagtgccatctctgatttcatttacaaaggctccacttacctgagtctagattctcagatttaactcagcaagaccttgccgtgtgtgtgtgtgtgtgtgtgtgtgtgtgtgtgtgtgtgatcctgcatgtcagggttcctcttcactgtcccaaagcaatacaaataaacaaagacaaaaagctcccttctttttttttttttttttttttttttttcagagacagggtttctctgtgtagccctggctgtcctggaactcactctgtagaccaggttggcctggaactcagaaatccacctgtctctgcctcccgagtgctgggattaaaggcgtgcaccaccataaggcactggtcacttgaaggagagttgatcaaacgtaagggaggaaagccatcgttacagtgggggacagccagtgacgacggcagggcttgcgctgagctgtgtgtgaaatgccagtctcccgcttttaaatgccttactaaactctgtttcctctttggagtatatgactcaccttggaaactgtcttgttttagaagatggctcaggtaaaggagcttgccgtaaaaccacaaggacttgagtttgcatccctaacactcaagtaaaattctggtgtggctctcccccctacccattttattttatgtctatgagtgtgttgcctgcgtgtatgataccctgtgcctggcactgtcagaagtcaaaagagagcatcagattttctgtaactgaagttatggattgtgagccatcatgtgggtgctgggcaccgaacccctgccatttcttcagccctggcagccctcacttgtcatcccagtattctggaactgaacttggacattacagcccgcaccccacatcagtttctgccactaatccatgttagccaatgaaaaaagccagcctatttctaactcaagcacataggatacccacccacccacccccttttgctgcttttcatgtttctttggctctttagatggctggttgggcctgacttggggtacagggtgtggtccctaagtttgatagcagcgctagctagcactgagtaggtggagtcaggatcctcgggacttcctggcagctagaatggctaaccctgtgagctccggctcagtgagaaacagctgcaaaaagtaagcaagaaaaacatctggtgtcaacttctggcttaccaacacacatacacacacacaccgacacacatgtgcatatgtacacacaaacatataccacacatattatactcgtgtacacacacaaatatattagttaaaatttctcctgggggatcctgtggtgtaacggttgacatcttggagcgtccgatgtccaagtggcgggtgggagacctgagtcctagtgtgccgggtggtaatgtgtgtcacagaaatggacactaaggatttgtttatttctagccctgcaggggctataagtcactcctttaaaattcatcctccagcaccctgctgcttctgttgctatggtggtgtgtctctggctttggtgtcaaggttgcctttgaaaatagatgggccaaaataacaatgtaacaggtggctgggccttgtgaagtagctcgttaaactccttggccaaggagttccatggaagagcatcacacaacccagaacctgcacgccaggcaggtactctgtagctgcatgtgtgcctgctctagtgcctgttagtgtgttcgtgcccatgcctgcctgtgtgtccccgtgtgcatgtgctgagtttagtctgttttccttgtgggtagtagtctttccccctttctatttttagttatagacttttcctcttctttaagctgtgctatgcctatttccggcagttatgtgaggaaagagttcaacttgctttatttagcaggaggtgccctttccttattttgtgtaaccagagtcctcctcctaaaaataaccttgctggtcctaatgggattcttgttatagctgatgtatcctatatttacagagaagatcttcttttagcatgcctctctctctctctctctctatatatatatatatatatatatacacacacacacatcacacatataatatacatgtatatatacacacaatatatcacaaccatacagtaaaatacaagttatatatacgtatatgtatgtatgtatataataatatacacatattagtattatatacatacacactaattctctgtaagttctttggttctttttccttccttccttccttccttccttccttccttccttccttccttccttcctttcttccttcctatcttttttgacacaggctttctgtgcataaccctggctgtcctggaactcactttgtagaccaggctggcctcgaactcagaaatctgcctgcctctgcctcccgagtgctgggattaaaggcatgcaccaccattgctcggcctttggttcttactgaatatggtagacattgttcattataaattcacttgccaattacaatcatttgcggcccccccccccccacttcctgggcctggacatatgaacaggtacataccacagagccatagcctccttttctctttcctttacagatccgttttagatttactaattttattattttttatacgagtgttttgtttgcatgtatatgtgtgcactacatgcatgcctggtgctcacggaggtcagaagaggtcactggattccctgggacaggagatacatacagatggttgtgagccaccatctgggttctgggaatccagccaggtcctctgcaagaacaagtgttcttacccattgagccaattctccagcccccaccccaccccctttcctcctttagatagggtcttatgtagctcaggctggcctaggactcactacttaggtgagaatgactgccttggttacttttctattgctgtaaggagacaccatgaccaaagggactttataaaagaaagggagaacttgtagggggtcacatgtccagaggatgaggccacggctgtcatggttgggagtgtggcagcagccaggcaggcatggcacttgggcagtagttgagagcttaacatctgattcacagcaggagacaggagacagagacaacgtacgaaacagtctcctctccctcccagttcctctggtccttctggataatcactcttcaaaaatgattgaaggggccagggaaatggctcagtaggtaaaggagtaagagagcttgctgtgcaagattgagttcaattccctcctcaactatggagaaagccaggcaggcatggccacgcatacctgtaagcctagcattggggtcggggactggaggcaagaggagcgtgagagcttgctggccagtcagcctagcctaaatagtgaggtgtgggtttagtgagcagccctgtctcaagataaccaatagaggaagataccattcatcggtggcaccttcaaactttcatgatgatgcatgcctttaatctcagtaccaggtaggcagaggcaggagaattactgtaagtctgatgccagtctagtctatatgttgagttccatactatccagggcaacatagtgagaccctgtcaaaaaaacgtttttaaaaataatatcttgtgtaaaaaaaaatattgaatgtgtggtggcacgtggctaaaatcctgacactcagaggcaaagacctggtgattagtttgagactagcctaatctacatagtaatactcttatcttcattttttttttttaaagatgggtctgtggtcatagctcagttgtagatggagaaagagagattctttgtctttctaggcctataggctaagggagaagagtagtgttgagttcaaggtctgtctgggctacatcgtaagttctaggccatcctcgcaacagagtgagccactttctcaaaaacaaaccaaacaacttacaaaaagtcaggaataagaacaagggctcgcgttatggctcagcggttaagagcactaattgcttgcttttccagagatcctgagttcaattcccagcagccacattagtggctcacaaccatctgtaatgggatcggatgccctcttgtagtgtgtgtctgaagacagcttcagtgtactcatagtaataaaaataaataaatctttaaaagagaaagaataataacaagaagaaatatcttgaacacgacactctgacagaaatcagccagcttttcctgtaaaggtctagaatcatagtagacttgtaggctatgaagtagctggttttctacagtcaactttgtggcatggaacagacacagactatacctgaaagaaaggtgacattggtttgacacttgaatttcagatttatttttacatgccggtctatatgatcccttttactaatttcctttttctgaggcttggtctccggtagctcatgctgtctgtcctcaaactggacacacacatctggaatcatcttcctgcctctgcctcccgggtgctcagcttacaggtgtgagccaccataccaggtttattttatgtggtgctggaaatggaacccagggcttcatgtatacaccaggcaagccttctgtctatgagtgacaccttcagcctcttaccccccccccccccccgccacatccaagctttaaaaaaaaagttaagttcatttgtgattcatagactgacaacagctggtggaagattagcttgtgctatgctctgcctcagcattactctcagagaggcatcaccacactaaccgcacctgaagacgcagccatctacacatgggctttgctatgcttgcaaaacagaatgttcttcatctcctcttttaaaacgttctggaaactttatttaggtagggccttgctggaggaagtaagtcactgggggatgggtctttgaaggtcatacctggtccctagcctccttttctcatcctgatttctgactagcaggaggcggttaacctcctccatctcctattctcaccgtctgggggtcagcaaacggtgcaagaacccctgaacccataggtccaggggccagcaaactgtgcaaaaaaaaacaaacaaaaaaaccctgaaaccatagttccgggagccagcaaaccatgcaaaaaacccctgaaatggaaggcctgggggccaacagaccgtgcaagaacccctgaaactgtaagtcctttatgtcagctattttatcacaacagtgagaaagctaagggatatcccagcaaagccaagggtcccctgtcacatgtatgacagagaactattggctgtaaacacccacacaacaccagccataaccccgggactccaaaactttcatgtgatgcatgaaagatggcattgatttctaatgcatccaaccatttctgctttttgcctccctgactggttggttacatttcccactcttctgttggtggaggtgaggagcaagaacatctgcctttcttcagtccactgactttacagaaacctcagtcctaaaatatcagtcattaccgctcgctgttgttgcagaaaccattgaggactggctatagacggaaccatcaattacattaataagcttaagcctgcatcatccctccctcctcattagttttaatttttgaaatgagtttcttaactagatatttttttgcgagacagtttagagacgattatgatttagcatgcagaggagaaagttgagcaagatttgaagccaacttatttccaagtgtacaaacatttaattacaatgatacatttggatatgtggacatttactttgctttcggttttgcaaagggaaaacacaggaggcccaacagccactgtccactctaacacgcccaattcatggtgttcgtcattgttaatcatggtttcagtgagatgtaggcccagacgttggaagatgtggtccccaagtaggggtcctgatgggacagttaggaggtgtggccttgctgaaggacatatgtcacggggtgggtgttgcggtttcaaatcatacgccatcattcccagtttgctctctgcttcccccgtggtttgatatgcgagttctcagctgttccagaggcctcctgctgcacttcccatccatgatgaagatggactcttattgctctggaccaatgagcccagccaaatcaacccttctttctgatgtttgatcacagccacagaaaagtaccaagtacagttgtattgggcttttgactggtcatcttggtgcagtctgaagtcccctaggaagggtctcagtgaggagttggatccggttgggttatgggcctgtctgtggtaggttgctgtaattgtgtcaattaatgtgggaagacacagcctaaaagggagcggcacattttcctaggtttgcgtcctggactgtgtcaaaaaggacagcagggcagggaatatggcccagttaagtgtatgcactgcagaggacctaggtagggtggcttctaactgtgactcaagcactagggagggccagcatcccttttctggcttttgtgggcacttgcactcaagtgtatcaacccacacacaaacacacacaaatataaataactaaaagataaaaatagaacctggtgtggtggcagagacaggcagatatttgaggccagcctggtctacataaatgagttccaggacagtcaaggccacatagagagaccctgtctcaaaaagaaaacatatatatgtgtgtgtgtgtatgtatgtatatacatatacatacaaacacacataaataaaaacaaatacatcttttttatttttatatcttttttttgagatagggtttctctgtgtagcttggctgttctggaactagctctgtaggctaggctgttcttgaacttacagctatacccctgcctctgctggtattaaaggcaacaccgccactacccagcaataaatcttattttttttttaagggaagaaagtgagctgagcagtttgtgtgtgccatccatccatccatccatccgtccaatccatcctctctgtttttttttttttttttttttaatatatatttggttggttggttttttttctttttttttttaatttttatttattattatatgtaagtacactgtagctgtcttcagacacaccagaagagggagtcagatcttgttacggatggttgtgagccaccatgtggttgctgggatttgaactctggaccttcagaagagcagtcgggtgctcttacccactgagccatctcaccagccccatcctctctgttcttgactgtggatgtgactagttgctttgagttctggccttgacctttttgcagtaatgaactgggacttcccattctcaaccaagtgtcccatttcttccctagggttctcctttgagggtgctgcctgtcatcttcatttgcatgtgtagctaattgatgttccgaggatagtcacgtcctcagtgtcagggaggctgagggggtcaaaggtcaggtcacttccttcctccagaaccatctgtgtttcccacagccaaagggaagtgaacatgggcttattacttagtgactagggttactgtagaaataaagattctgaagtgcttactggaatgacatatatctggagcagatagcccagaaattatgaaaatcaaaatttttgaccttagttgggagtcaatactgccttcgtttgccattctctggtaagagaggaagcttagatccaattttagattacctaccttccagctattttaaatcccgagggaaactttgtttttggaaagtgtctctatctaggttgtatcttgcagaaaggtacttttggtatgtaattacatgaatattcagatgcaatggaatctagatgagaagctatgaccacttaagagatcgcttaagtcaaggctttaaaaatatatgatttaggggctggagagatggctcagcagttaagagcactgactgctcttccagaggtcctgagttcaaatcccagcaaccacatggtggctcacaaccatttgtaatgagatctcatgctctcttctggtgtgtatgaagacagctacagtgtacttatgtataataagtaaataaatctttatatttatataaattagagccaaaaaggtggttcagcagctgacaaccttggttctatccccagaacttacatgttggaaggagagactcaattttcactcacacatcatacacctctgtaataataataataataataataataataataataataataataacacacctgcaataataataataataatgataaaataacaacaattaataataaagtgagaaaaaaattcctttacagctaacccagcagctgaatgtggtggcacacacttttaatcccagtcttcaagaggcagaggcaggtggatctctgagtttgaggccagcctagtctacagagtgaaaccttgtctcaaaaacccaaatcactaagcatgttatatagtcccacatacccataatccttaaaaagatcttataaaagagcagtgagggctaggaacatggcgtgcctagtgtgcccacagccctgggttcagtccccagcaccacaggcaactgggcacagtggcatacacctgaagttctagaattcaagagaatcaggagtttaacctcctccgcagttacacggagaatacagggacagcctggactaccagagatcctatctcagaaatagtaactattagatgaaacctgtttccaatatttttgaacctttgcaagtggttactggaactggactccccgagacctttgctgagtgacagtgctggactctctggggtcagagaccactcagggtttacgtaagaactctggaagattgtgatggctgctatggccttgcccctccctggggtgctgggttgaaacccagcctcacactcattcttagcaaccttgtaacgcctgagccacactctcagtccatcgctaccttatttctacctcctgaatcccgccccccacccccaccacctcacccccccaccccctagcttctacagagctttgtcctaggtggttgcttagataaggttgttttctggatcttctggttcacagtgctaggggcagggacatatattatttgggtttctttacatattggatttgggtttctgttcaccttgaacggggaacagacatgagcagtccaccccaagagtcctcctgcccagtttcaggagtggagaggcccaagatcagggagctacctcctttagcttatccgcatcccaggcccccatctgcttgtggctgtgtgttgtttccctgagctataattttcataccacagaggatttcactttctttttttcccctctcttcctctccccctctctttccttccttttatctcaccctccatccctctcttccttccttccctccctctctctctttcttctttccttccttctctccctccctctatccctctcttccttccttccctctcctctctctccctgcccccttctgccctccactcttctcctgcctcccttcctttgcctggctgccatgaaactcagtatgtagctccagaattgcttgattctattgctgctgtctccccagcaccatgattctgggcatgagctatcttgcccagcttgaattttacttgtttattttggaggtgactttttactcagtagccccagtggtgatccactcgagtgcagggattaaaggtgtggggcatgatgctcaacaccttcttttttgtttttgttttgtttttgaagtttcactctttagccgattacaaggattagaagtttttgtgtactcccaaggttgtgccaccctcagttgactaggaaacagttaagtttccaaaataaacccctgtgccgattggtagtcactccccagcctcaggcaacctcaagtctactttataatcatacaataaatatgtggccttttgtgtttggcttttggcatagctgtcagttgagaaattacctctatcaaactggcctgtgggatattttctagattgatgatggctgtgggaaggcccagcccactgtgggtggtaccattccctagtcagatgggtataaaagaaggttcatgggcaagccctgggcagcaagctagtaagcagagttcctctctctttcctgatgtaagctcctgtcttgagttcctgccttggcttccaagatgatggagaataacttctaagccaaattaaccctttcctccccgagttgcttttggccagtgttttatcacagcagtaaggagccaaactattccatctgtttttgtttagcattttgatcgtcagagtcaacattgcagcacgaaacacttctccatgcctctttgtagcttttttaaaaatttgttttatttttattgtattggcattgtgcctaccagttgatggactcctgggttcttccatggtaatgacccctggtggtaagaacatccaaccagacattattattatttttgttttgtgttgttttgttttcatttagttctctctgttgtttgtttgtttgttttgagacagtttttctctgtgtagtcctggctgtcctgacaacatttgttttcaattcttttagcgctattccccagggtggggttgctgcagggtcatgtgaaattcctatgttgaagtgggttgaagagctgccaactgtttcccactgtaccttccctctggcagagtgcgaggactccaatttgccaacgctcctcgttttcttttttcttctaaccaccctggagggtgtgaagtggtttggatttgcatttccctaatgacttacaatgttggacatcttttctcatgcctattggcatttttttttaaatcatttttgaggaaacttctaatcctttgtctggcttttaattggcttacatttaaaaaaaaaagagttgaaagtgtatatgtatgtgtgggtgagtgtgtggtgtgtgtgtgtgtgtgtgtatggtgtgtgtggtgtgagtgtgtgttgggtgctagactatctgttgaaggtttttatttatgtgcatgtgcgtttgtacttgaacaccaatgcaaggtgaggactgaagaaggacttcgaatcccctaaagctggagttgggagctgcccacatggatgctgggaaactgaactcaggtcctctggaagagcagtataggctcataacaattaagccagctcttcagcctccaggtcagattctgagtacacatttcgtactcacatggtaagcccactaccaactgaacctgctccttagcctgtcacagagcatggtatctagtgattgatacaaatgatcacaaatcttttatcttttatcttttttttttttttttttgttctttaacacccttcataggaatctgccttatatacctctttgttctctatgccttgagtgattcacagaagttgctgtcaggagcccggttgtcaggaacacattccgattgtctctggcttcttgtgtgtgagagtcgctctctatggcatatgcctaggagtggaatgtacgaacatggttcctttagtgattataatatttatgctgctgtgggcaatgtatgaaaattacatttggggaaacttgaggattctgtttgtttttttgtgtctggatggggaagaaagtcattactaaaaggatgtggtatttgcatctgaaatttgcattttaggcttctggtatgttgctgttagcaagtattatgttaaacaagcaaaaggcaagtcactggagactccagtatgcgatcaatatccccttaaatgtatagatattagcatgtagcataaccatgtttttggctggctgatccagtggagagctttgctaaccgtacagcattccgtcttaatcaaagttttgctgtctgtgtgactttatctccttgaggctgaacatagtctgaaaatattatatggaaaggtctagaaataaacagttcataagtgttaaactgctattattcttagaacgatgaaatctcatgacctctcattctcttcttgggatgtgtgatatccatccttgtgtacgaggtagtcattcttattgtttatgctgcttgcctgtcagtcacttagtagctccccagtgatcagattgcagcccagtgttcaaggaactcttcatttttctcaataatggtctcaaaatataagaaatatatagactagatatagaggactgggcacttacagccctttcaggcatccactggagttttgaacaagggaagctgggggagatgaacctacgtgctaattaaatcaacatcctgtcagccaccttccaacttctatagggccggaggcgaggatattacaatgcagcagaacagcaacccaggctggaggggtggggatgcatcccttccttggtacctacgtggtggatgatgccaagatgaatcccagtgatgtgtaacccggatgtgtttagtgatctcattctgtgctagcacagggtaggcgtggcagaggatgggttcagtatagaatgcccagaacctggaggagatggagatgttctctgggtggggcaaatctattgctgttcatgagagggaatcttatggagaaaactccataagccaaggccaggccaaggtcaactaagaagacaaagagtagctcctggtaggcaggtgggtggggccccctcccttcctgctctcttggcctgttttcattctgtcccatcttaatgtaaaccagactttcagaccccactgctccagcacagcatcttacagtgcatgtcaaaagttcttttgtgtgacctttaaaagtctggctagtcccagactcttgtcttctttcctggtacttagtgcttctgcccaagtcaaaaccaattacagttaccaacgcacgacacagttaacttttaatatctctgtattttattgtttgcttctctcaaaaaacaatcagagctaatgaaacgtcggctattacaatcacacggctgcttatgtaatggttccacagcgtccttaataaatgagatctaaattgttctgtcttcttgaacccagaaactccttctgactcagggtgtctggagctccaatgtattttctgaggatcatgctgtactctcttctggaaggatttggtcaagagtgataaagctagacacaataaatacgcagcaataggcacgtctttcagaacgaaagtattgatttaaacgaacaagcaaaccctatgtcttagttagggtttactgctgtgaacagacaccgtgaccaaggcaagtcttataaggacaacttgtatgtaactggggctggcttacaggttcagaggttcagtccattattatcgaagcaggagcatggcagcatccaggcaggcatggtacaggaggagctgagagttctacatcttcatctgaaggctgctagcagaatactgacttccaagcagttacaatgagggtcttaaagcccacagccgcagtgacacacctattccaacagggccacaccctttaatagtgccagtccctgggccaagcatatacaaaccatcacacctgatttacctggaaaacaaatttgaagagaggatgtttgtcatatgctggaaaatgcacttcgaatattctgtttttacatgctgagacaaggtttctctgtgaagcccaggctgacctgaaacttgctctgtagaacagggtggcctcaaactcagagatccaattgcctctgcctccggagtgctggaactaaaggggtgtgtgtgtgtgtgtgtgtgtgtgtgtatacatgagtgtaaatgaagtgggcatgggggaaggacaaaggctgaaatccagtcttctcactctctcttcacctgtttttaaaaagatttatttacttgtgtgtgtgtgtgtgtgtgtgtgttgcctgcacgtatgcctgtgagccctgatgtccacctccaaagatggagtggaactgagctgcagatggctgtgagctgccatataactactgagaactgaacctggatcccctagaagagcagtaagtgctcttagctctcaaagccatccctctagcccttcaccttataatttttttcaagattatttacatatatatatatatatgtatatatgtgtgtatatatatatatatgcttttgtttgcatgtacctctgcatgctggaagggtgcattggaattcttggcactacacggtttttttgtttgtttgtttgtttgtttttaaatatttatacttatttttttatacatatgagtacactgtagctgtactgatggttatgagccctcatgtggtttctgggaatttgaattcaggacctctgctgctcactctgctggattgctttgggcaacttaatctttttaaagctttttttttttttttttttggtttttggagacagggtttctctgtatagccctggctgtcctggaactcactttctagaccaggctggcctcaaactcagaaatccgcctgcctctgcctcccaagtgctgggattaaaggcgtgcgccaccacgcctggcattaatgctgttttgaaggtaactaggattaagtgagctgggtgtgatggcttgcatctgtaattttagcaccgaggctgaggcaggaggattgccaattctccgattcctggcagataagcagaatcaggtaccatgttctcggactttctagcttctggaacatgcaccgaatcaacttgcggcctttataagtttctcaggctctgccattttactctagcaacagatgacttggcatagaattccattttatgaggttttgcataatttgctttttgtataacgatatataatgcttttacggaagtatacataaatctaggggaaacaaagtagttttgagcagctgggcccagaggccatcttgctgtcctggttccaggtagaaggatgctgatgcgtcctgagacattcagtttatcctgtatcagttctgggttcaactaggcacctgcatcacccccattggagattgactgacagcactctataccctagaaaggacatccttgtcacctctccggaacctgcctggctcttgaggacagtgcaaagaaagccaggacaacacaggacaacacgccttccctgagcatgactccttcctgagtctctcaaagccctctgtgtggcaaatgtgtggtgtttatagccctggacaaacatctgctccactctgccttgatgcagaagaaggaatccagggccttgcaagtgctggctcaggactgtgccccggagctacttttcccagctccatgaatttctggattccctctgctgtggatttgttttgtatttgaacatttactgtcccctccatcccccacccccttgcttcttctcatgctagggaaagaactgagagttgcaggtccatgtgctttgccgctaatcaatgcccaccaccagtggcccaatgccagtgtatttgatgtatacttttaaaagttccttcttagtcaatgattctgattatagcacatctttttgtgtttgtgtgcgagtgtgtgtgtttctttgtgcttacatagagaccctcagaagccttctttgcatatttagtgtgtgtgtgtgtgtgtgtgtgtgtgtgtgtgtgtgtgccttgcatgtgtgcagtgtccacagaggccagaagaaagagtcaggtttccctggatacagggaggggccgttggcatattgcaagccaccttattggtcctgagaatcacatccaggtcctttgaaagagcagcaggtgctcttaactgttgagccctctctgctgccccagcctcgtttctgagacagacttgctgactgggaccttgtgctcactatttacactaactaggctgtctgtccagcaagcccctcggatccacttgtatctgcttcctcagccctggggtaataagcacaagccatcatgtccagcttttttgggggtggggttgggggtgggggtacccaaaaccaggtccttatgtttgcaaggcaagcattttctcacttaagccatctcacccccccccccatcaccctcaagtgataacacacctctgcagtaaaaaaaaccaccaacacgtcttccttagacaagggagctccgattgcccgaagcagcgtatggggagcatgagtatgagtagtgtatgtgcaatatgagtcttctcagttgatgatttgggtcttgtggctcccagagacaagacttcccttattaccagataatgatcaggtgatagattagtactgccttgattatctgaggtagattgatttgcctcgtcaactgcatgaatccctcaatgcctgtttctactgaagactcgatttctcccttgtctgcctgcctgttcacagtggcattgctctgcctgtcatgggggaagacatttttgtatctaagcagaaaattctaagtctgctgagtaagggctgacctaaaaattgtgatgcagggaaatcgagtttcactgttttatgcaaaaagttcctatcttgggagaattgcagtttttattctttggggtaggtaagcagattttccctatcgtttaagaagccatgctgccttggggaagaggcagaaaagggagggaaaaaagcaacaaccaaggaaagggctatcttgggaattttgcttgataaagccctgatgtggaggagtgccctggacagagactgagagactggatgctgccagtgccttgggttgttctcagaggtctcctgcattacacagtaaccagccactgttaagcaaggttgccagagaggccagagggctggggatgtctgacagctgggagaaaacctgcctttcagcacaacgcctggggttgatttcagcactgcagccatcgggcatgttggtcaccccagtttgctttttaaagtttgtttgtttttaaagacagggtctgtacctgaggctggccttgaactctcagagatctgcttgcctctgtctcctgagtgctgggattaaggtgcgtgcctacttgtccatcttgaagggaagtcagggcaggaactcaaggtaggaggaactggggccagggactggagcagaggccatggagcaaggctgctgcttactgcctttgttagtcatggcttgctcagcctgcttcttatacaacccaggatcactcgcccatgggtggcaataccgacagtgcattggccccttccacattaaacattaatccagaaaacgcccccacagacctgtctacaggccaatttgatggagacatttttttcaattgaaatttcttcttctcagacgaccctggcctgtgccagaaaaaaacccaaaccaaaactaaccaacatattgatatatgcccatagcctcaaaactggagaagggcaggcgtttgaggctagccttggctaatagtgactttgaggccaacctggaacacatgagactctgtccttagggagagaaaaatttaggggctggagagatggctcagcaataaagagcactggctgctttctgagaggaccggagttcaattcccagcattcacatggcagctcaaagctgtctgtaatttatgttctaggggatccaacaccctcacatagacagacagacagacagacagacatgcaggcaaaacaccaaagcacataaaataggaatgaataagttggactcgagagatggctcagtggttaagagcactgactgctcttcctagaggtcctgagttcaattcccagcaaccacatggtggctcacaaccatctgtaatggggtccgatgccctcttctggtgtgtctgaagacagcgacagtgtactcatacaatagataaataaagcttaaaaaattaaataaaatgcttcacaggactggaattgacagaaactacagctgtcctccactgtaaaagcatgcttatgggtgggggtagcaaaagcaaagaagttggggaaactgatggtaatgggaacacagttgatggggcagaggagcagcccctccctgagcaccatcagtccatcttcctggcacaggacctaggggttccctgtttctgggatggggcagcacagatgtgcacatcctggcctgcatgtttcttcttccgcaaccatcatctcaaagggctgtggcaatcacatggctcctcctgtctttgctttaagtgaagtttgcaccacagacaggggtgccagctagtcgctagaatgctgcttggcattctttgaactctaggctttaaatcttgtatctggaaagtcctaagggagggatgctgtcttccccccctcactaaaataaaccctctatcaaatcactgaaacaaataaaacctttcggtctggaaccactcacacccggcaatctgacacacagagatggaaaacccttggcttccagttctgtgcttctgactctaggctgcctttgattctctggaggtgaccaaaatagtaatgtgtttcagatcagagctaaaaggaagagaacatttcatgcaggggaatgtgtttcctcactcagtcaatgattagcaagagcctttgttgctgttttgagacttttttgtatgggtgtgtgtagccctggctgtcttggaactccgtagaccaggctggccttgaactcaagagatctgcctgcctctgcctcccaagtgctgggattaaaggtgtgcttagtgagtctttttctgtcatgctttatggtgatttgaagattcaaagcagcgctgagtctcccacctggtatcaggactgaatatagccttaagcaaaagtatcaatacacacggccagatcctcaagggtgcatagaaaccaggcactccagttttcaattttacatctgcctgcctgcctacctgtctgtctgtctctgtgtgtgtctgtgtgtgcaggaagaattgactcttacaatacatgtggtggtcagacgtgtactatgtgtactacatgtgtacatatcttctacatgtctactatctgcctgcctggtgccttaggagatcataagagggacttgaactctggacttctgtaagagcagccagtgcttttaactacttagacatctctctccactcaaatttgtgtcttatttgctggctttaagtatacctcatcagagaagcacttagtcttctggcacccaggcttatttccagcattttctcagatccaatcagcagtcctttccttatccttccatatacagcaggagaatcaaatgcttgatatggttcctaattcattttgaagcggctaaggccttcaccagccatgactaacacaccatctacagtgttaatggggagatattggatgcaaatctattctggggactcaagagggtcctactggccctcctgagggaagttaacacttgaggagacatctgtacatcctggtttgtcttcttcctaccctggtacactgagagcaagcctccttcttgaagggtcccaggagaagagaccaagtagagcaagttctgtttgttttctcacccccatgtctctgattcttccctccatggacaggaggctgccctaatgccaggaactcagggagagaggatggtaattttcctttttaagacaaggtctcaacgggcgtggtggcgcacgcctttgatcccagcacttgggaggcagaggcaggtgaatttctgagttcaaggccagcctggtctacaaagtgagttccaggacagccagggctgtacagagggaccctgtctcacaaaaccaaagacaaggtctcactcactatgtcgatctggctgtcctggaacttacaatgtagaccaggctggcctcaactctcagagatccacctgcgcctgcctccccagtgcttgggttaaaatcatgttccactatgcccagataatgccagtctcttttttctcccctatgtggtttttgggaaaaagccaggttgtaccaccagttggatacgcctgcccagacaatggctgttccttaaattgctttataggaaatacataaagccccaccttatggtattagggatgttaccttaattttgctgtgccttgaaatggaatatccatccacctcatgaatattgatcaggttctgggaatacagcgatgagtgagccaacagatcgttccttaatgggtgtagagtctgatcgggccaagacaaattagaagtcttccagaaataatagctagagtccaattgtacaagtaggtgatacgcaaggccaacaggaaatgacctcaggttaagactcacagtgtgagacgagccaaggatctgtgaacccgcagaactcaggcaaggtgagctggtgtaacttgcaggaagtatgactcaatcctgagtgtcaccaggaaggcttcaaccaagtcatctgaggaaagggtgtgccaacatccactaccaaagtataaagggatcggcagagagaaaaccaaataccacgtcccaagcttgtcccagcaagaacgaacgggtcatgtacttgggcattgtgtaattgccactgcatagatagcattggaggacgatggaggcagactgagtggttttttttgtttgtttgttttgaataaaaatttaaaaaattttttcctttttttttcttttttttccattttttattaggtatttagctcatttacatttccaatgctataccaaaagtcccccatacccaccccccaaaatttaaaaatttaattaaaaattttttctctgtgagagagagagagagtgagtgtgtgtgtgtgtgtgtgtgagagagagagagagagagagtgtttgtgtttgtatacctagtgcctgcagaggccagagtagactggatcttcaggaccttgagttacatacagatacattgtgagccaacatgtagacgctgggaactgaacccaggtcctctgcaaaagcatcaaatgctgagtcacctctccagcgcccctgatnnnnnnnnnnnnnnnnnnnnnnnnnnnnnnnnnnnnnnnnnnnnnnnnnnnnnnnnnnnnnnnnnnnnnnnnnnnnnnnnnnnnnnnnnnnnnnnnnnnnnnnnnnnnnnnnnnnnnnnnnnnnnnnnnnnnnnnnnnnnnnnnnnnnnnnnnnnnnnnnnnnnnnnnnnnnnnnnnnnnnnnnnnnnnnnnnnnnnnnnnnnnnnnnnnnnnnnnnnnnnnnnnnnnnnnnnnnnnnnnnnnnnnnnnnnnnnnnnnnnnnnnnnnnnnnnnnnnnnnnnnnnnnnnnnnnnnnnnnnnnnnnnnnnnnnnnnnnnnnnnnnnnnnnnnnnnnnnnnnnnnnnnnnnnnnnnnnnnnnnnnnnnnnnnnnnnnnnnnnnnnnnnnnnnnnnnnnnnnnnnnnnnnnnnnnnnnnnnnnnnnnnnnnnnnnnnnnnnnnnnnnnnnnnnnnnnnnnnnnnnnnnnnnnnnnnnnnnnnnnnnnnnnnnnnnnnnnnnnnnnnnnnnnnnnnnnnnnnnnnnnnnnnnnnnnnnnnnnnnnnnnnnnnnnnnnnnnnnnnnnnnnnnnnnnnnnnnnnnnnnnnnnnnnnnnnnnnnnnnnnnnnnnnnnnnnnnnnnnnnnnnnnnnnnnnnnnnnnnnnnnnnnnnnnnnnnnnnnnnnnnnnnnnnnnnnnnnnnnnnnnnnnnnnnnnnnnnnnnnnnnnnnnnnnnnnnnnnnnnnnnnnnnnnnnnnnnnnnnnnnnnnnnnnnnnnnnnnnnnnnnnnnnnnnnnnnnnnnnnnnnnnnnnnnnnnnnnnnnnnnnnnnnnnnnnnnnnnnnnnnnnnnnnnnnnnnnnnnnnnnnnnnnnnnnnnnnnnnnnnnnnnnnnnnnnnnnnnnnnnnnnnnnnnnnnnnnnnnnnnnnnnnnnnnnnnnnnnnnnnnnnnnnnnnnnnnnnnnnnnnnnnnnnnnnnnnnnnnnnnnnnnnnnnnnnnnnnnnnnnnnnnnnnnnnnnnnnnnnnnnnnnnnnnnnnnnnnnnnnnnnnnnnnnnnnnnnnnnnnnnnnnnnnnnnnnnnnnnnnnnnnnnnnnnnnnnnnnnnnnnnnnnnnnnnnnnnnnnnnnnnnnnnnnnnnnnnnnnnnnnnnnnnnnnnnnnnnnnnnnnnnnnnnnnnnnnnnnnnnnnnnnnnnnnnnnnnnnnnnnnnnnnnnnnnnnnnnnnnnnnnnnnnnnnnnnnnnnnnnnnnnnnnnnnnnnnnnnnnnnnnnnnnnnnnnnnnnnnnnnnnnnnnnnnnnnnnnnnnnnnnnnnnnnnnnnnnnnnnnnnnnnnnnnnnnnnnnnnnnnnnnnnnnnnnnnnnnnnnnnnnnnnnnnnnnnnnnnnnnnnnnnnnnnnnnnnnnnnnnnnnnnnnnnnnnnnnnnnnnnnnnnnnnnnnnnnnnnnnnnnnnnnnnnnnnnnnnnnnnnnnnnnnnnnnnnnnnnnnnnnnnnnnnnnnnnnnnnnnnnnnnnnnnnnnnnnnnnnnnnnnnnnnnnnnnnnnnnnnnnnnnnnnnnnnnnnnnnnnnnnnnnnnnnnnnnnnnnnnnnnnnnnnnnnnnnnnnnnnnnnnnnnnnnnnnnnnnnnnnnnnnnnnnnnnnnnnnnnnnnnnnnnnnnnnnnnnnnnnnnnnnnnnnnnnnnnnnnnnnnnnnnnnnnnnnnnnnnnnnnnnnnnnnnnnnnnnnnnnnnnnnnnnnnnnnnnnnnnnnnnnnnnnnnnnnnnnnnnnnnnnnnnnnnnnnnnnnnnnnnnnnnnnnnnnnnnnnnnnnnnnnnnnnnnnnnnnnnnnnnnnnnnnnnnnnnnnnnnnnnnnnnnnnnnnnnnnnnnnnnnnnnnnnnnnnnnnnnnnnnnnnnnnnnnnnnnnnnnnnnnnnnnnnnnnnnnnnnnnnnnnnnnnnnnnnnnnnnnnnnnnnnnnnnnnnnnnnnnnnnnnnnnnnnnnnnnnnnnnnnnnnnnnnnnnnnnnnnnnnnnnnnnnnnnnnnnnnnnnnnnnnnnnnnnnnnnnnnnnnnnnnnnnnnnnnnnnnnnnnnnnnnnnnnnnnnnnnnnnnnnnnnnnnnnnnnnnnnnnnnnnnnnnnnnnnnnnnnnnnnnnnnnnnnnnnnnnnnnnnnnnnnnnnnnnnnnnnnnnnnnnnnnnnnnnnnnnnnnnnnnnnnnnnnnnnnnnnnnnnnnnnnnnnnnnnnnnnnnnnnnnnnnnnnnnnnnnnnnnnnnnnnnnnnnnnnnnnnnnnnnnnnnnnnnnnnnnnnnnnnnnnnnnnnnnnnnnnnnnnnnnnnnnnnnnnnnnnnnnnnnnnnnnnnnnnnnnnnnnnnnnnnnnnnnnnnnnnnnnnnnnnnnnnnnnnnnnnnnnnnnnnnnnnnnnnnnnnnnnnnnnnnnnnnnnnnnnnnnnnnnnnnnnnnnnnnnnnnnnnnnnnnnnnnnnnnnnnnnnnnnnnnnnnnnnnnnnnnnnnnnnnnnnnnnnnnnnnnnnnnnnnnnnnnnnnnnnnnnnnnnnnnnnnnnnnnnnnnnnnnnnnnnnnnnnnnnnnnnnnnnnnnnnnnnnnnnnnnnnnnnnnnnnnnnnnnnnnnnnnnnnnnnnnnnnnnnnnnnnnnnnnnnnnnnnnnnnnnnnnnnnnnnnnnnnnnnnnnnnnnnnnnnnnnnnnnnnnnnnnnnnnnnnnnnnnnnnnnnnnnnnnnnnnnnnnnnnnnnnnnnnnnnnnnnnnnnnnnnnnnnnnnnnnnnnnnnnnnnnnnnnnnnnnnnnnnnnnnnnnnnnnnnnnnnnnnnnnnnnnnnnnnnnnnnnnnnnnnnnnnnnnnnnnnnnnnnnnnnnnnnnnnnnnnnnnnnnnnnnnnnnnnnnnnnnnnnnnnnnnnnnnnnnnnnnnnnnnnnnnnnnnnnnnnnnnnnnnnnnnnnnnnnnnnnnnnnnnnnnnnnnnnnnnnnnnnnnnnnnnnnnnnnnnnnnnnnnnnnnnnnnnnnnnnnnnnnnnnnnnnnnnnnnnnnnnnnnnnnnnnnnnnnnnnnnnnnnnnnnnnnnnnnnnnnnnnnnnnnnnnnnnnnnnnnnnnnnnnnnnnnnnnnnnnnnnnnnnnnnnnnnnnnnnnnnnnnnnnnnnnnnnnnnnnnnnnnnnnnnnnnnnnnnnnnnnnnnnnnnnnnnnnnnnnnnnnnnnnnnnnnnnnnnnnnnnnnnnnnnnnnnnnnnnnnnnnnnnnnnnnnnnnnnnnnnnnnnnnnnnnnnnnnnnnnnnnnnnnnnnnnnnnnnnnnnnnnnnnnnnnnnnnnnnnnnnnnnnnnnnnnnnnnnnnnnnnnnnnnnnnnnnnnnnnnnnnnnnnnnnnnnnnnnnnnnnnnnnnnnnnnnnnnnnnnnnnnnnnnnnnnnnnnnnnnnnnnnnnnnnnnnnnnnnnnnnnnnnnnnnnnnnnnnnnnnnnnnnnnnnnnnnnnnnnnnnnnnnnnnnnnnnnnnnnnnnnnnnnnnnnnnnnnnnnnnnnnnnnnnnnnnnnnnnnnnnnnnnnnnnnnnnnnnnnnnnnnnnnnnnnnnnnnnnnnnnnnnnnnnnnnnnnnnnnnnnnnnnnnnnnnnnnnnnnnnnnnnnnnnnnnnnnnnnnnnccagaatctcattacagatggttgtgagctaccaagtggttgctgggaattgaactcaggacctctggacgagcagtcaatgctcttaactgctgagccatctctccagcccctttttctttgtcattttcttgggtttgatgaataaatgtttgttcatcaatcagtatcattgtcaaaaaaccttaagtacagagactgattgtcagttgttggtttggtgctttgtgacgatagctcttgtagcccaggcttgggtctaactttacatagtcaaggatgactttgaactccagtccttaccatacggtctggcttatttggtgctgggggaggggtgtggggcaggaattccagcttcatgcactctacccactgagctctgtccttagccctcaacaagtcgtttttaaatttacattttttgttgtgtgtgtgtgtacacacatgtgtgtgcatgtatgcatgtgtgtatgtgcgcctgtgtgtgcatacacagtatgtatgtctgtgtgcgtgcacacgcacaagttctaacgtgacgaccagaggacaattttcaggggtcagttatcttccagcatttggggccccaggatcaaactcagtcccttgggcttggtagcaagtgcctttacccccagagccctctcactggccttctgctcttcatccaaaggagagccacccttcagaggcacagcagtcaagcttataaaagacttcagtctgcaagacttcttcagtggtgacttttttttctggatcattaactctgtctagtgcgttgtgagacaagacttactgttggaagaagttcattatttatttctgttttatgctaaactatccctttaatgatgttttgttgggttggttttgtgtggggctggggagggttgtacgtttttgaggtctcttatggctcagggtggacttgaaccctctgtaaccaaggctgatcttcaactgagtctcccatcttaacctttcagttgcttcacaggtgtgtgccaccatgtctggctccatggagatttctgtcagggttctgtggaatcatatctccagcttttctatctgtgtcctccctgtaccaccctcccccattcttttctatcccatcagcctctgctgacccttattcatgacagggtcctagcttgcatggtgatttggctctagaaaatattccttgatcatccagtaagtttgcagcagtgagcttgcagttttcaaattgtggttttggcgagagatactaatgaagactcgggcacggagcagcaggccgagaataaggaaagaatcctcttaaaatagacctcacgtgcttctgtttagttacagggtaatttgtaaaacatgagtgtccaacccagggtgtggggcatgctaagcaggcagtctgctgctgagctgcatctcagcccccagaaatggatgcttccttccctgtcccctggaccctcagcactgcataccatagaattgcaagcatgcagatgcagcctcacacctgtgtcaatgaggatggtgtcctaagtatcaccaccatgacaaacttttcttccttggtattcagtttctggcttccttgctaacgactgtgtttatttcaggtgtcattacatagctcgttctctctctctctctctctctctctctctctctctctctccctctggtttttcgagacagggtttctctgtataaccctggctgtcctggaaagcactctgtagaccaggctcagaaattcacctgtctctgcctcccaagtgctgggatcaaaggcgtgtaccaccactgcccagcacagcacacaggtctctttccctcagcctggatgggttttagcttgggttttagcaagcttcaccacacctatcagaggaggattagccctccccgggaagtggctatctgctgtactcaggaagccagcagggtgttcctgagaaaggaaggtctctagtgtattttctagaatacaagctgatatttttgtgagcttgttctagaaacttcattacaggctccaagaacattatttcctatgattgtaaataactgaacaacctctctcatcttgatctttttcttttcttttcttttcttttcttttcttttcttttcttttcttttctaaattcccatgggtgtttgagtaggatctcatgtagctcaggctggaccacaactcagtatagagctaaagctagtctattctccctatccttctgaatttgcctacgtcatgctgggattgtaggtacatacctccactcctgaccctaccaggataaattagttgtataaaatgatgtagttgctgtgcagtggtgtgcagcactcgggaggcagaggcagaggcagaggcagggggatcgcttgagtttgaggatagcctggtaaatagaataaatgctaggataaccagggctacacagagaaaccctcttttaatcccccagcctccaaaggcatttagggttacaagatggctcagtgggtatggatgggcacttgctggcaagccttacacatgacaggctgtcgatccctagggcctacatacacaataaataaagtgtagcccaggctgaccttgaagtttctacgtagcccaggcaggcctggaaccactgatcccctgttttcacctcccagctggtgagttgcaggggtgtccccccatcccagctgcattttgatttctccctaggctcctgtcaatgtctgtgggttcagtgtctggtactgctctcgggggtatgagggagggggcagggaggtgctttgttagacttattcagatgctattttttagtatggtcactttgtgacacaaatgtgtctagacacatacatagtaatggttcaaactcactcatggccctgtgtgtgtgtgtgtgtgtgtgtgtgtgtgtgtgtgtgtgtagtgtcaatggtgaggccagagcagggcatcaggtatcttctctcgctttccctgagttattattatttattatagtctctcattgaactctcaccactgcacagcaagtacatcattgaactctcactgtttcagccagactggctgctcagcaagtctccaagttcaaaccacctcccatcccagccttgagctctagcactggattccaggacaggttgccatgatctgcttttacataggtgctggggatttgaactcaggtcctcttacccactgagtcactttctcagtcccctctccctgctctgttttaagttaaggccttgggctagagaaaaggctcagcagttaagagcactgactgctcttccagaggtcctgagttcaattcccagcacccacatggtggctcaccaccatctgtaatggaatctggtgccctcttctggtgtgtctgaagacggctacagtggactcatacacataagataaatcttaaaacaaaaaaacaaaaaagtctcgatcttgctgtgtggcactggctggcctggctggtcttgaattcaggcttgtctacagcatcctgctttccatatccctttaaaatgttattaggcccacttagaaggccaggtcaccaagaagcttcgtccccggcctgccacacagaatagtcttcctggggccttagcggctgctggctgttctttcagagtactccaggggaggggagactctgggctgcaggaatggaattgtattgcagtcctggcagaggcccaccctccgtggatggatttctccaggcttgctctgtgaaagcatttgggatttcgatcaagcactttgttttaattaaactgatgaactactgtgcaaaattcaggtgcagtggcagcaccctgttgggcatccatctctcaggaagcctggtcttttgtcttggtcacatgaggttctggtcgggcttagacgtgcaataggtacagattggttgtttttttttttttttttttccctaattgaaatcaaggccaaaggacgtgtgtacacaatgtacaatctgtcacgtcaggctgcgacttgggctttccctacttcacagcggtgccgtctttggaattggcattttcctggctagaactttgtggtcagatactccatttcgatgctgggtaaccagtcgatggccagctagctcccagttagtcttgagaccaggctcctgtgtatcgtcaggacacagctctctgtaagctgaggaggctcagagttagtttgtttatactgtgtgaccaaagcatatctaatatgcctagtgaatgttttctaggtctgtgtttcccaagtagtattttcaatatctgtggtatttttaaaaaaatatttcatctcatattgtattgatagggattcttgcagggttgtatatatttcctttatgttgcaagaagactattatggcttacccaacaatatctaaacattctttgctactcttacttcttcttcttgttttcgatacagggtttctctgtataaccctggctgtcctagacttgttttatagaccaggctagcctcaaactcacggagatccacctgcctctgcttctgcctcccgagtgacaggattaaaggtacaccaccacaactggcttacccttcctttttgagactgagtccctttagcccaggctggccttgaactccctatgtagcccaggctgcccctgaacttctgacaggtgccaacagacctagtataggtggtgctagagcttagtgcttgctaagtaagtaccctgccaactgagatgcatccctagccctgctttgttgttgttgttgttttaaatttttgaaacagggtcttattctataacctaggctgtacttgaacgttagcaatccccctgactcagtctcccaagttcttgggctggttttgaacctaagacgctcctgctcacaatcctgaggttagagggtggaaactgagccagggtcttctgccaagaccagcaagtgcttttaactgccgagccatctctccagctcttacattcaacattttaatgaatacataaaaggtatcaggttctgtcatggttcttctcctgggtaattgatgagcctcttagtgttgattttttaaaaatcaagcactctatttagttaataaagcaacccgggacaggattgaaagcagctgtgtttgccgtgggcatggctgttacgtggccacacatgcagaagcaaaggtttagagaccaaaggatgactcctctctgcctggctaccaggggcagccacggctttggttcctaggagttgctggatatatgtcgtaggtctcagagaccattctgtgaggccgataattaaggaagctaaggtctcataaaaatgaatatggtctcccatttgagcaaaggacatgcgacatcacaccttcacatttcattcacttcttcataggcgaattaaaagctccatatgtatttatggtgtactacgtggtatgtatgtgtgtatatatgtgtgtgtatatacaatgattaatttttactttatattaatttttaggacacgatcttgctgtatagtttaggctcctatgcaactctcaatctcctgtctctactttcagactgctgggattccaggtgtgtgtcttgcccctaggatattaactgaatggctgactgattgattggtgtgtgtgtgtgtgtgtgtgtgtgtgtaaaggtcagaggacaatctgaagtgttgatcctagaatctcttgcttgtgtataaatcatccagtgttgagtaaagaaggagataatagcgatgaatggccagtaaaaaaataaacaaatcggtattcatgcttgtcatcccagcattcagggtatcaggtgttcgaggccagcctgggtgtcatagccagaccttgtcccaaacagtaaagtaggggtagggagatccttcagctgaagtgcttgctgtttgggtagagcgattgtgtgtatgcttgtgggtgtgtgcatgcaacatcagatgcccatggaagccagaagagggcattggattccttggaattggagttaggagtggttgtcagccactcaaggaggatgctgggaaccagacaagggacctgcaagagctgtgtgtactcttaactgctgagccatctctcgagcccaagtagatattaagtttgaacgggccacttctgaggcaagtgggaagaaaatgcaaataatctattgactttacacaggtgaccgcggggctggctgcctgtgcctttaaggggaacccaaaggaggtttttatctctgggtaaaagacttaactgtttgctgaaaacctcaacaatcaagataaacagtgtggaggcttcctaggttgtatcagaggctagctcttcctcccgctctgtgaacacacctacttccgttcggctgcagtaactgatttcctgtgtagtcagagcctctttcctgggcctgggtagggccgtagttaaccattgctgtacttccgctgctcagagcagcatagctttctgtctagatgccagggcctgcaggtttccacttgctaacgtcttctctctggaatgcattttccacacctgatgattcaccagcgccatcccttacttgctgtcgttcacagcatccacagaggagtttgggttgggtcctgggagaccggaagttagcagaggcagagtgggactctgggcaagggacacgggttgccagtgaagattagcgcctgcaacccggaaggcggctcggctccttggttcagttgggtcaggcagatggaagcaagcattgccagcctctcttttagtctgctatataactgctagactggagagctgagcgcttgcttcaattactctttttccttgtcctacgaatgcaaaagaggatgagggaaaaatgacagaagtgtgtcactaaaataacttattagactttgggattcttagtcattgctaatggttgggactttgaatattcattagtgcaccctgctgtttggagagtgcacgaggctctctccgtgtgtgtgtgtgtgtgtgtgtgtgtgtgtgtgtgtgtgtgtgtgtgtgtgtctatggatttgagctctgcctttccacttaattagttaggaactcattgaatggggaacagagtgatacgaaggaacaggagaatgggctctttgtccctggatccttttgtgacttccttgggtagaaacgaattctgctcaccctgagccaagttggagcttccttctgtgctgtttctgcccttgctcatttcagccctagatgtgtttctggcttctcctgggtcaaaatcctctcgctgacctctcaccgtcacttaggactctccttcctcagggatttctctgacatggcagggaacattggcgtctgagtgaggcaaaggaaaatatgaactcttgtgtaggttctcatcggatcgactcctgcatcgtgaagcaaatggacagggagggctgttgtagtttgtcaaaagaccctctctcacaaagaccacagagaccaccatcattgcaaaatgcatgaggattttattacttatccaacatgttggggaaccccctgtcagcacgcaggccggaggagagacccagaacaaagagagaacacacttttatacctttgtaagggccagatataggcaccagggtagtctggcttattttaattggtgtaaccaataacctttttggacattggttggtttgtatagggtgactctcattttgtctgtccttgtggtttttagcttgaggtgggggggcaggataattgttaatcttgttctggtggctgtaatcttagaagttttgaccgttaaaactatgtttctgtatttgtttagtgagtcctttttttttttttttttttttttttttaaatctggttctgtacttggcctgttagtacagtttggaaagtacttttgagcgggaaggtactgggtagtcttgaatttattttggatattacagggttaaggaagagctgaggggcgttccagtcacaaatgggatagcttgatagaagtagtaacagtgtgtccttttaagttggagaatctttgtggcggattccttatgtatagttatattagcttatataattatagttatattttgttattatagttattttgaatgtgtgtatatatttggtgtgtgtgcgtgtgtgtaccagtgtgcgtgtctcctggagtatcatccacttcctttaagataggctctctcattgacctggagctcaacaattagcctagactggccagcaagcccagatacccacttatcgccgagtcctcagcactgtaattagagacaagcacagcttctggcattttctctcgtcttccagggactcagccctcaacgcttgcaagaccagtgcttcattggccgagccatcttcccggaacatatttttttcccccatttactttaatatttaaaacatactgcgttcaagtaatattgatctgcatatttgatccccttaaatttcgcacctgaggcaaatacctccccccactcaccctaatcctggctctgttgcaaaaattcactcccaggctctctgcgcagctgtcttcctcatagatccacagcaatcatggctctcactggctcctgattgcagaagtaaaacctagctcccttggatcagtattcaccacacccctcttattcccctcacaggggtacctatcctgcctggccctgtgccttttttctctaaccaccttctagcctttacttgggagctccaatgctcttgcttatgtctgaattgtacccctgttcccaaaatagtcctgcctagctgcagaattctacttgcctgcttctagccagaccccccctaggctggcttattcgccctgctttcctatcggaagctctgtgtttctgtcctgttcttaccctggctgttgcattcaccactggacgatggtttatctgtttacctgtgccctcagatccgctgccagttccttgaggagactggccagggcttttcatgtcaaacgggtaaatgaatacagttgggtctgtgagctaaaaagcagcttgtagttagaaatgtcctgcgataagccatagcttggcagaggggaatccctgtgtaaatacatatatataaataatacatatatttattattttatgtgtgtgggtgttttgcctgcatgaatgtatgcctattgcatttatacagcgtccacagagaactgaacccaggacctcctgaagagcagccatctctagcctctctatcttactttttgagacagggtttctcagtaaacctgaagctcaatgattttgccagaccgcctggctggccagtgacctctagggaacctgtcagttccagcctcctcagcccgcacctgtgtgccttgttgggggtcgaacttgagtggccagcactataccgactaaagcatctctccagctcctagaggatggcagtggtgaggatgatgaaggtggtggtggtgatgatgatggtgatggacatgacaactgtgtcaacattcaaatacaaacaaagcaaacataaaataatgtgattacctacattataatcatcatcctatcataccaaccaactcacagccagtttggtttcattacatagctgcccaccctggttttgttttgtttgtgcgtgtgtttttgtttcttttcccctgtttttgttttgttttgttttgttttgttttgtttttttgtttttctctgccaaaaaaaaaaaaaaaaagagcacttctgttgatttcaaaatccaggtttgaaattccaggtggagttcacaaggaatttggatcttgggtgggcaagccccctgaagcaagtcatttgggggaaatacttgtcgtttgtttgtctgtctgtttatttgtctgttttccccagaggattggaactaagaagctgtctcaggacatgaagtcagcaggttgggaaggagactgcttcttaggcaagaagaggctggccactttgaaggcttacttttgaaattagaatgtagggcttggactttagctacttcagcagagtctgccagccccaagcaccttgcttgtcgattgtgacaagggtgattttgtctgtttgcttttttttttttttttttttttttttaaatttaaggaacaccaacccaagactttataaagtgggggcgagatgagaacactctggttttccgtgctcagccttgccgaggtgacctggcaacgaactgtttccctttatcccgctggatttaatccttcttctgagtaacagagcagggctttgtttcccgtgagagtggatttctgctaccaggagaattagctgccggtttattctcgaaggtgccttctgatgcaaggagcctttggagctgtgcataaataggggccattgttcgggcatttggtgcagaaggtttgagttgctagcccggttccagtcggcctccaggtcgctctgactggctggtttgtttttcttttctcgccccgcccccctctcctccggaggccacaggtggtccttccctctagatggctttggtccctgcatctcacagctcaccctgttctggatccttttctgcctagagacgagaagaaaaaaaaattcctctgtgtccgaatgaattcgattgacaatgaaagaactcgaagtgagcttagccaaggcaccgcagaaattgatttgggaagggtacggcaaggagataattatgtttctgattattttatttgagggggaagtaattagagattgaacctaataccttgcccatgaaaggccagtggctaccatggaactgtatctgggactaccatattcctcagactccaaaccccaggttttgctatttggcagcactgggccatcacacacgtgaaaccagcatcccaagtctttatttgcttgtttatcacttatagtcagggtctcatgatgtagcccaggctggccttgaacttgtgtccttctgcctcagccccacacccccaagttgctggaattataggcatttattatcatgcctagttaattattttattccttaaacttttgactgtatgaatccctgtctcgggggatttttttttttccctatatgaggggtgtgtgtgtgtgtaccattgtgtgagggtgggtgggcgtgtgccatggtcacctgctaaggtcatcagaggacaaattttgggtgtgagttctctccttatacgatgagattcccagcaatcaaactcgggttgtcaggcttggcagcaagcgcccttaaccatgtgccatttttaattttttaattagagataagagaggcagaggagccatgttgagcaagctggttcattctttgtgtttgagaagagtttagaacaaggacagtcatttaggtgatcccctctcccccacccccactcccacccccaccatgagtctactgtgcaggtctgatctccaccctcattaaccacacctcttccgggactttgtcaggcccctatacccggcctttcttcctccttccatgggcccctgcttcctgggtgtccggtccatacttagagctataacttactggtaaaacctcttttattgccatccaaagtcaaaaaggtaccactatctagtgttgttatctttttattttttggtttttcgagacagggtttctttgtctagtcctggctgtcctggaactcactttgtagaccaggctggcctcaaactcagaaatccgcctgtctctgcctctcaagtgctgggattaaaggcgtgcgccaccaccgcccagctaagtgttgtcagcttgaaattccaatcccaaattacagctaatctgcctaaattgtcctgtcaactctggttgtatttggatgtcgcttgcccacagaagttagacactactgctaaccaccggtttccagttgaagaccacctagctatgtgtgaaggaggtgaacgccagaccgtttgtgtctgcctggttcaaaagccgacgtggcctccagatgacccaaactcattataatcctattataacgataaagagcatgcccagacagtagtactggaacatatcttaccatgccctaattagtgaggaaagaggctgtataatacctggaacccagataatgataagacatctgtagagttgtcgtctacaacacttacaacaccccctcctcacattctccgtgatacatgggtgtacacacacacacacacacacacacacacacaccactcatacagccaataatcactagacttgcttctgatgctgctgctgcagactgcttgaagccttggattaggttctgtcagtttatccggagtctgtcagtacatagcattctaaccagagtctgtcagtatgtagcagtctaacggctcaatttgaggctctgtggttatttattaagctactgttacaaggagcacaattcctttttttaagaggaaaggaaaaaaaaaaaacaagtgagtacccctttctattttcttgacaggtagcagggaaagaaagccttccctgcctttaccgtggtgagatatgtagccttgctgggaggcctggcttgatttgtatgcattcttcaacccaaccttctgggcaactcagagaattgaaacccagtgactgtccctccaagggatgggagaggaacaagaaaccggctatgtccagtcacttgccaaaatggtcaaaccgaaaagcttagacatctctgtttgtttgcttttgggttttgagacagggattttgtgttccctagatgacttggaactcacggccatccctctgcctcagtcctctaagcgctaggattacagatgtcagccaacatgcccagccagtatgcctcgctgtcactttctctacagtgacgtttgttatgttatgtggttttagagtatttaaaatgtcattaattgtttcatatatgttcgcaatgcattttgatcatatcagttccggcctgcaccccatttcctccagaccccacccctccaggacatctccttcccactttttttttgtcatttttttaaaaacaattttttattagatattttcttcatttacaattcaaatgctataccaaaagtcccttataccttcctccctcccactttcatgtccacttttttattttgtttttccttttttttctttctgttaacccactgagtccactcagagctgcctactgaagtattgactcaccttgttggcttgctcttatagctgcagggagttcccgagtgcctgtgaccatgtcacgaccaggatgcctttgcatcgccctgccgccctctcttcaggctgttccccagccttggggtgggggtgggcacaataattctaaaataataataatgaatcgcttggttaaaagaatgcatggcaatgtgcacgtgtaatcccagtctcaggggaccgagacagaagcatctctggccaactcgggtgacctagtaaaaaacgcttgtctcaggaaaccaagcccggagaaattaacagttaaaaaaaatacagataggagaaaatgtgatgtggcatagaagctgaagtctgaaatgaaaacacaagggagtggagcgtgactggagttagcgtcaggtggctatttaatacgcattaaacattaaagagcagcaaaaccaaacagagggccaagnnnnnnnnnnnnnnnnnnnnnnnnnnnnnnnnnnnnnnnnnnnnnnnnnnnnnnnnnnnnnnnnnnnnnnnnnnnnnnnnnnnnnnnnnnnnnnnnnnnnnnnnnnnnnnnnnnnnnnnnnnnnnnnnnnnnnnnnnnnnnnnnnnnnnnnnnnnnnnnnnnnnnnnnnnnnnnnnnnnnnnnnnnnnnnnnnnnnnnnnnnnnnnnnnnnnnnnnnnnnnnnnnnnnnnnnnnnnnnnnnnnnnnnnnnnnnnnnnnnnnnnnnnnnnnnnnnnnnnnnnnnnnnnnnnnnnnnnnnnnnnnnnnnnnnnnnnnnnnnnnnnnnnnnnnnnnnnnnnnnnnnnnnnnnnnnnnnnnnnnnnnnnnnnnnnnnnnnnnnnnnnnnnnnnnnnnnnnnnnnnnnnnnnnnnnnnnnnnnnnnnnnnnnnnnnnnnnnnnnnnnnnnnnnnnnnnnnnnnnnnnnnnnnnnnnnnnnnnnnnnnnnnnnnnnnnnnnnnnnnnnnnnnnnnnnnnnnnnnnnnnnnnnnnnnnnnnnnnnnnnnnnnnnnnnnnnnnnnnnnnnnnnnnnnnnnnnnnnnnnnnnnnnnnnnnnnnnnnnnnnnnnnnnnnnnnnnnnnnnnnnnnnnnnnnnnnnnnnnnnnnnnnnnnnnnnnnnnnnnnnnnnnnnnnnnnnnnnnnnnnnnnnnnnnnnnnnnnnnnnnnnnnnnnnnnnnnnnnnnnnnnnnnnnnnnnnnnnnnnnnnnnnnnnnnnnnnnnnnnnnnnnnnnnnnnnnnnnnnnnnnnnnnnnnnnnnnnnnnnnnnnnnnnnnnnnnnnnnnnnnnnnnnnnnnnnnnnnnnnnnnnnnnnnnnnnnnnnnnnnnnnnnnnnnnnnnnnnnnnnnnnnnnnnnnnnnnnnnnnnnnnnnnnnnnnnnnnnnnnnnnnnnnnnnnnnnnnnnnnnnnnnnnnnnnnnnnnnnnnnnnnnnnnnnnnnnnnnnnnnnnnnnnnnnnnnnnnnnnnnnnnnnnnnnnnnnnnnnnnnnnnnnnnnnnnnnnnnnnnnnnnnnnnnnnnnnnnnnnnnnnnnnnnnnnnnnnnnnnnnnnnnnnnnnnnnnnnnnnnnnnnnnnnnnnnnnnnnnnnnnnnnnnnnnnnnnnnnnnnnnnnnnnnnnnnnnnnnnnnnnnnnnnnnnnnnnnnnnnnnnnnnnnnnnnnnnnnnnnnnnnnnnnnnnnnnnnnnnnnnnnnnnnnnnnnnnnnnnnnnnnnnnnnnnnnnnnnnnnnnnnnnnnnnnnnnnnnnnnnnnnnnnnnnnnnnnnnnnnnnnnnnnnnnnnnnnnnnnnnnnnnnnnnnnnnnnnnnnnnnnnnnnnnnnnnnnnnnnnnnnnnnnnnnnnnnnnnnnnnnnnnnnnnnnnnnnnnnnnnnnnnnnnnnnnnnnnnnnnnnnnnnnnnnnnnnnnnnnnnnnnnnnnnnnnnnnnnnnnnnnnnnnnnnnnnnnnnnnnnnnnnnnnnnnnnnnnnnnnnnnnnnnnnnnnnnnnnnnnnnnnnnnnnnnnnnnnnnnnnnnnnnnnnnnnnnnnnnnnnnnnnnnnnnnnnnnnnnnnnnnnnnnnnnnnnnnnnnnnnnnnnnnnnnnnnnnnnnnnnnnnnnnnnnnnnnnnnnnnnnnnnnnnnnnnnnnnnnnnnnnnnnnnnnnnnnnnnnnnnnnnnnnnnnnnnnnnnnnnnnnnnnnnnnnnnnnnnnnnnnnnnnnnnnnnnnnnnnnnnnnnnnnnnnnnnnnnnnnnnnnnnnnnnnnnnnnnnnnnnnnnnnnnnnnnnnnnnnnnnnnnnnnnnnnnnnnnnnnnnnnnnnnnnnnnnnnnnnnnnnnnnnnnnnnnnnnnnnnnnnnnnnnnnnnnnnnnnnnnnnnnnnnnnnnnnnnnnnnnnnnnnnnnnnnnnnnnnnnnnnnnnnnnnnnnnnnnnnnnnnnnnnnnnnnnnnnnnnnnnnnnnnnnnnnnnnnnnnnnnnnnnnnnnnnnnnnnnnnnnnnnnnnnnnnnnnnnnnnnnnnnnnnnnnnnnnnnnnnnnnnnnnnnnnnnnnnnnnnnnnnnnnnnnnnnnnnnnnnnnnnnnnnnnnnnnnnnnnnnnnnnnnnnnnnnnnnnnnnnnnnnnnnnnnnnnnnnnnnnnnnnnnnnnnnnnnnnnnnnnnnnnnnnnnnnnnnnnnnnnnnnnnnnnnnnnnnnnnnnnnnnnnnnnnnnnnnnnnnnnnnnnnnnnnnnnnnnnnnnnnnnnnnnnnnnnnnnnnnnnnnnnnnnnnnnnnnnnnnnnnnnnnnnnnnnnnnnnnnnnnnnnnnnnnnnnnnnnnnnnnnnnnnnnnnnnnnnnnnnnnnnnnnnnnnnnnnnnnnnnnnnnnnnnnnnnnnnnnnnnnnnnnnnnnnnnnnnnnnnnnnnnnnnnnnnnnnnnnnnnnnnnnnnnnnnnnnnnnnnnnnnnnnnnnnnnnnnnnnnnnnnnnnnnnnnnnnnnnnnnnnnnnnnnnnnnnnnnnnnnnnnnnnnnnnnnnnnnnnnnnnnnnnnnnnnnnnnnnnnnnnnnnnnnnnnnnnnnnnnnnnnnnnnnnnnnnnnnnnnnnnnnnnnnnnnnnnnntgtcccttcagtgagcctgaagaaatgccttgctttttgtttgatgtttagcaggtgactaggagaacctgtaagacactgagtgactggccggtcctcagttgtttaataccagaaaccactgatacgttgactcctgaaactatgaaagtcaagtctttctcccctgaaccaacaatgttctttctacccattcctaagaagtaatacacttggccagttgggtttgtttttttcgtcttttgctgtgtttacccctcggtgagatgcaaatggatgaaataaagaaggaacagaaggaaagaaacccctagctctccatgactaagagcttgtagcaagcagagcttgggtgagagccattggctcattacatactccgtggtcctaggtgtgggagtttttatcccgcctgcatcttccctcccctctcctctgcatcagcaggagctctgcaaatatttctagaaagaagggatgagtaggaatattttaggcactgtggccaagagaaggtagcgatgtcgtcgtgtaggatgagataaagcaagtgtttctttttttctttctttttatttacatctatctgtgtaccacatgcgtgcctggtgcccatgcagtccagaagaggacgttggatcccttagaactggttgcgtgctgctctgtgggtgctggaaaccaaatccaggccctctagaaaaccagccagtcctcttaatgttcttattgataaaattcaaactatagtcatcttggatactatttcttgggtccaccaaggaaaggaatggaattctttttgggggagagaggcattttactgaactgcaagccgagagtcagtctgtccagtcaccatgacagaaatgtggcgtcatttttcctgcacaagttctttggagctggttgtggccgccatccagagggttcacgcagcgtgtggtgtggctccgcttctgtgatactgggaagctcttaatctgggaaactggtctcagaatctggggtggctccttggattcgaactcagactcacccgccccttaactgtgtcgtctgtgctcattacaatcatgtttctagaagtttctcttgtgtcatctctaagatgaatactagtgattggagtcagctgatgcatagctgtaatcccagagacttgtgaggcgctgaggcaggaggctgtgagtttgagcctggaatgcatacacatagtgagttcaaggtcagcctgagctacaaagcaagaggcaggagttctgttttcagcatctacagcaagtagcccacaactatttggcactctagagccaggagatataacgacctcctctggtgtctgtgcccactcacccatgcatttgtgcgcgcgcgcacacacacacacacacacacacagacatatatacataaaataaaaataataaatcttttcttcccctttacaaaagggaagataagatggctcagccaagtccagtgacctgggtttgagcctttgaacccacatgggggaaggagagagctgatcttgcaagtttttgtcttaactacacccaggcacacatgcgcatgcatgctcgggccagggtcagacaaacagaaaatcaatgaatataaaagagaagtttaaaaaagctgagagatcttgcctctttcacaagtttctcatgaaactaaattaagattgaatttcaagtgtcatgagtttcatactttttgatgtatttttttctcccattcatttaaggatgtagacttaaaatgcggcctactgatccagtccgtggacaccgcacagtaggcgctggggtcatctccacttacttagagacagtgattgcttcctcccttaattgcaaggcaccatatgctcacctcaggaaacttggaaaacacaggaaagcccaataaaacaaaaattaggcactttgtccacagcacagaggtgcttctcagattccataccgctgtgtgcctttcagtctcctgtctggatacatcacacgctcttatgttatttctcatgtatggatatgtgtgtttagctgcgtgtctgtgtgtgccaactgtgtgtaggtgcctgaggaggccagaagagggtgtccgatcccctgcagctgggcttacaggtggttgtggaccattcaatgtgggtgttggaaaccagactcgagtagcaagcttgcttaaccactgagccatctctccaaccttccatcccccatccctgtgcattttaaaataagtcccaagcccacatcatgcctattgcttggcattattttcacttatgaaaaaccaccacccttaatattttaatgctctgaactttaacaactgcattctagtctatcctacaaatgcactaaacggcacctacgcaattttcaaaagcattaagcttgatttgcatttattttccccattagacttaagtcagtgctaaactagtacatacatgtttgtacgcagctctgatgaattccttgggggtaaattacaaagctgaattgctgagttagagaggtctagagatatatagctcagtggtagaatgctggcacagcagaggcaaggactgggcttgagccccagcactgaagaaaagaacgaagagcatctacattttgtgtgtgcatgtgtgtgcatgtgtgttcatgtgtgttcatgtgtgtgtggacaccagaggacatctctgggtgtcaagctctggctactgttttcttttgtgctgaggcagggtctcactgtgtagaccaggttgacctctgtccagaccagttttgagattaaaagcatgtgctaccacaatgggcttcttgatagtgtctctgtgggggctgcagagacggctcagtgattaaaagcacaaactactcttacaagggacctggggtcagatcccaacacccacacagtggctcacaactgtctgtaactccagttacttacacacacacacacacacacacacacacacacacacacactaaatacaaataaaaactttttttttaatgtatgagtacactgtagctgtcttgagacacaccagaagagggcattggatcccattacagatggttgtgagccaccatgtggttgctgggatttgaactcaggacctctggaagagcagtcactgctcttaaccaataagccatctttccagcacccctcccccatccccttttttttttgaagtgacagtttcttattggcctggagcttgctcagtaggcttggcttgctggtctgtctgttccagggatccacctgtctctgtttcccaacactgggactctaaggcatgccaccaggtcaagcttctgttttcaatatggggtctagggctagaactcaggtcaccatgatataaggtcaccacctcagagaaacaccagcagccctcatctgagtgtttgaagcagtcgctactgccctttttaaaaaaaataagtaatttatttaattttaattcatgtgcgttggtgtcagatgccctggaaaaggagttacagacagttgtgagctgccataggctgctggggattgaacccaggtcttctgcaagaacagccagtaaccatctctccagccctctaatggcttattttatacagctacttttgtgtctagatttttctccttttaaaagtgacttctgttattttcatgcttcccattttccatattcttttcctttgttttcctctccggtcctgttgaattaaactttaacccgttcctcctcccttggccctctgtttggttttgctgctctttaatgtttaatgcgtattaaatagccacctgacgctaactccagtcacgctccactcccttgtgttttcatttcagacttcagcttctatgccacatcacattttctcctatctgtattttttttaactgttaatttctccgggcttggtttcctgagacaagcgttttttactaggtcacccgagttggccagagatgcttctgtctcggtcccctgagactgggattacacgtgcacattgccatgcattcttttaaccaagcgattcattattattattttagaattttgtgtttgtggcaattgtgagctgtctggcatggttgctgggacttgcacaggtcctcagtgagagcagtagatctctgtctgtgtctctgtctctctcggtctctcccaagacagggtttctctgtgtagccctggctgtcctggaactcactctgtagaccaggctggccttgcactcagaaatccgcctgcctctgcctcccgagtgctgggattaaagatgtgtgccaccactgcccagccagtgctgttttctcttcccacactaaattggatttacttgtcccatgggctctctgttgtgtctgacaaaatttcctgactacctggtagtgactggatctctctgccctgaactcactatgtagctcaaggtgatcttgagggctgagaatacagaggtggccaccgtgccccacttttcttgccactctttaggggtgtctgtctttgatattttgcagtctcactactgtgtgtatagattttttttccttttattctgttcagaacatgacatttgggagggtttgtgttttcacaatctaagaagcctcttaaatattatcttttaaaatattgctaatgttactttatgaccgaacacaagagttgactgacagccccagcggacacagttccctcttagaagacaaactcccactggcttatgcagaatgtgaaaggtgcctgtctgttcctgcagggatcaggactcctttaataaatgactttggcccaggagtccccatcagcatggtggcacacgccctctctccccattccctcttcccttcagagtttccctcttcccttcagagtttcacatgtactaggcaagccctctgcctgcacttccccctccagcactctctctctgagcctcttcttctctgagccaggtcctgtgcttcttttttctttccagccctccctgccaattcctacttctgcttctttcttttccattgttttctgacatggcctttcataatctgctcctcagaggacacagactaactcaatgtctctgtttttattaacttgttcttggactaaatgtatatggatcttcacatcgtattctcttttgtcctttaactattttttcattccctcccatatgtgtgtgtgtatatatacacacagagagaaatatttatgttgcccatgtttgtgtatgctctcatgagtttatgtatactgcatgtatacaggagcccttaggggccagaagagggcagcagataccctggaactagagtcacagaagttgtgactctctgtgtgagtgaatgttgggggacgaggggggaagggggacggaaccccgttctgtgcaagaataataatagtaagcattctttttgttttgttttgttttttgtttttgttttttgagacagggtttctctgtatagccctggctgtcctggaactcactctgtagaccaggctggcctcaaacccagaaatccacctgcctctgcctcccgagtgctgggattaaagacgtgcgccaccaccacccggatgtgggatgtgggccaccacgcccggccgaatagtaagcattcttaattcctaatcaatctttacagtccctttcttgccatgtctgttgccccacccccacccccacccccatttttgctttttcaaagacaaggcttctctgcatagccctggctgtcctggaacttgccaccagcacccagcaagaaatttatttctagaagtactattaatcttattttcacatcaggctgtttttggcttgttttattttgtttttttaagaggaaatatatttttaaaaaaaaaattcaatccctctaaccattaatagttttaggtatactcattttgtgttctttttcaaatgagaaaacacacacacacacacacacacacacacacacacacacatttggaagggctataatttcagaagtcatcagttctcctggaactggaggtacaggcatttgtgatgtgtccagtgtgggtactgggaacccagttcaggttctttgcaagaccaagactgtgctcttagccactgagctgtctgtctctccccctccagaacagttttattacctccaattccctggagctctaggatcatctgttatgcttgctattcgtggcacatcatcaatttaagttttctttaagctgttcgttaggttgcatttcatcttggtgtcttaacgtcatctggaggacctaggacaacctctggctgggagccaatgtttctgctaacttcttagttaagagcatccaggtcgccctgctgatatctcagaattgggggtgtccatttttcagcaatttgtttgtttgtactgagtttcaggcccttaaaatcgtcctcttgttgtgagatcacggtagctttctctccactgtctttcatttcatgcagtgagcagcccgaggaggatcctgaatcccttgggatgttccaactgtcctcctagggtggttcagagttggacatccttcatgatctgaaagccccctcccacagcccatgaagcagcccaagttttccatcttcacttcccctttgggctgagtacatcgctcagacacccattttgtgtgtccctatctttggggctacatcttatgcagtgggagggttttattcagcagccccatcccttatcctgtctcatcaccaccacattattaaactagacatctcctctattccaccgagcgctggccttgaacattctcatgcatgggttcctaagtcccgtcgtccattctcagaaaagcagactaggagaccttgtcactgatggtgcacgtatcttatgtcttgagagggacagaaagctgctattatttcccaaacctttctatgagacaaacaaacagcaacaacaataatacggccccgtaagattttacaaatggctgcttagaaaaccaaatatcgagctgaaaagatgacacggctggaaaggacttgttggcaagcttgacaattggagtttgatctcgggatccctcccaggtggtgagaggcaagatccgactgccacaagttgtcctctgacctccacatgtgcgccacggtgctagcacgtacacattccagggtattcaatatcctctcctggcttccttagaccctgcagttagacactgcatgcacgtatgcacacacacacacacacacacacacacacacacacacaaaacaaatactgactctgctattttttccatttcagaagctgggtgacagagatctggccaccccctggtcccagctttccccaatccttctcaatttgtcctttgtcaatgggacaagagagattgaagtgatatatagtcctaatccactgtgctctgctaaaaaaaccaacttaaaatgaagcgatgtattgctgtggcaggtgtgctgcttccaaaaactgtcagcatgattcctcactgattctctatacctttctgtcagcctccgcctcaccattgctggccagaggtagccaagcagttgaaggtggcagtgtgtacccctgcctgtctttagtctggggtgtcctttattcatgttgtaaggctcaatactcttcctgccttcaactttgcaaattaacagggaaacttcagatgtctcaagtgaggaataagacataggtttggaaaatgcttctagaaccttctgctagagtgaagtagataacagattccagtagagcagcaaaggacaagagccttggaggagggcacctgcgcaagtctgctctgtgtgggatgaagctacggagtagcctgggatccggtgaacctggagcacttacctaccacacacatctctactcttcttctccaagctcgtccactccattgcattggagaaccaggaagcaggaacttcttcagggatcaaggcagagcctggggcccagccatcagtggctttcatccccagctgtacgcagatattgaagagattgttctcaagagtcttgggattttgaactgaccttctgggccttcagtctttctacttagaattctaaattctctaccagcatcgatttataactatcaatttacaattatcaatttataggagaagagggttgagcactgctagctgcctttctttacctctgtggcttattttggtcaggttttttttttttttttttgaagttcttctgcctatttgctgaccggtctctgaatacatgggattcgtttccacagcatgcatcttggcggccatcaattcagctttcatgagtccaaacttgtattgtcttcgtttcttccctcatttggctcactggagacctaaagaaatagatttaacgtctagaacatctgttttcagcctgtggatcctgactcccttcggtgttggggaggtcgggggaatgaccctcttacaggggggctgcttaagactgtccgaaaacacatatattttacattgtagttcacaactatccctaaaatcacagctatgaagatagcagtgaaaataattttatgatcgggggtccccacaacatgaggaactgtattaaagggttgcagcattaggaaggttgagaaccactgttcttgaaggttcttaacttgaagtcaagaactatcagtctcaggcgataaaagtgaagccactctttatgtgtgcagagaaccactgggcatcagctgggcctacaccccattcatttgcttctaagggctcctgcgtggctggactgttcatctagctgggatgttggatctctctgcgcttctaacacaccagttattcataaaagcatttggctgatggctttctcggaatggcctgctggtcaggacaagcctcatctatatttcaaggaatttcttaatgggagaaacagaagacttttcctttgattaattcattgctttttccccccctccccatccccagtcctcacggactcctaggttgggaactctaagaggaggtcagaaaggaaggctaggatatgggaataccatagagctggctctattaaggtctttgaatgttgtattgcattgtgtggcagctcgggagagcccacagtgattgggattgttcaacttgtacagcgcattaaaaacccacaaagagagccaagtgttgggagctttatcgtgttctcagccctctgctcatcattgtatgacctctggcttttagggccgtttaagcatgttgcaaattgtattgttgctggtatagggcacagaagtgcaccttgcgttctgtgtgctggggatcaaacctgaagcccctcatctgccaggcctgttctgccccactgagccacacccacctgtagagaataggcctgggtggtggtgtataaacccctttaagtctctggtttgattagacatacatacagtctcacatggctcaggctgccttctggcttgctagataactaaagatgttcttgatcccgggcctccacgccctgcacacaggcatgcaccactgtgtctggcactcggggaaagagtgttagattccttgctttctgcacctctgacttcagtgggaccctctggggttgctagaggcatggtggcccccagtgctgggcagcagccagagcaggaggccagtacaattctggtgtctttcagctacttccttccaaacgcatcgggaggcaaagaaggctcagcagtagtaattaattttctctccccgacaatccaatagccaacctggttctaaaaaaaaaaaagtttctcttacagacaagactttgaccttaactttttgcaggattgtaacgggttatccgtttactcacgttcccttaaatgcttcgggggccaggttttcttccattctacctgagaaggctgagaaggccctgagccaccaaggagaagtgtttatgaatttcaatttctttccagatccaaggtctgggggggaggacagtgtggaccaatcctacccaccttaccccctcctctctctgtcccttccaccttccttcccttcctttgttttttcctttacatttttaaaaaattgactttatgtctgtagggtgcatatagcggagaactgatgtcatgggtctggtggaggtcagaggataacttccgggtcctggtttctggagattgaaattagtctgtcaggattggtgtgagcatctttccctgttgagccatctcccttgcccctcctgttcgtttttatttgggtttggcgtgattggcgtattctttaaatggaggctttcccaggctgttgaagcggtgaaccttgggactaggtattgctctccccttagcctaacttgcctcgttgggacctagtatgctttgcttgttttacatgcgccctaagcaggtttatgctatgtgttgtcaggactcggggcaaacaccaagttctgtagctcaaacatgaagtcctttcgaaatgcagaaaggggtgtgctatgtgtttgggtcttgtcaaaatgtccccatgctcttggaatcaaacaacacctacccaaggaagccaacctggtctggaaggtgtttcctaggacaatattagaaagcagtaaacaaaccctcgctgtacacctgagatggtccttgatgtgagtctctagagacatcccaaggtcttagaaatgagctgaacaaggctggacatagtggcatgttcctggaaacccaaggctttcaaggctcaggcaagaaaaggagcctgaggttttgattctagcctgagcctacatagtgagaccctgtttccaaaaaatgaattgaaggacggacggctcagaagattaatgtaaaaagctgggtgtggctgcccctgtgcggggcatcccagccctatagagaagggtgggaatggagggaggatgcagagggaggagcccaccagcctggctccagggtttttgagggaccctgtttcaaggaataaggtagaatgctagaacaggacaccccttgttctcctctagtctatgtgcatctgtatgggtgcgtgcgggtgttcatacccaggaacacacaaataaacactaaaatttaaaaaggttcaattcattcaattaaaaaaaatgtaataaaggcaggcttgtgctcaactggacaggatcaatttcagcttctatagtgaagtattagcactactgggttcattgtcttcgagatgctcagtgggcaatagtgcttgctgctaagcaagtctgaggacctgagtttgacggttagaatccgcccagccagggacgaatgctgactcgccgaggctgtgctctgacctccacttgtacaccaaagcttgtggcagcctcctgtctgccacacacagaaaataaataaaaatgtaatagaaacttaaaagaatttgtaggcatagttaaaacctccccagtaataaataaatataaattttaaaactgtgtgtatctatacgtgcgcatggatgcaattgtccacagagttcagaagacggtgtcagatccttctataggttttaggcaactaggaaccacccagtggtgggtgctgagaaaagaactgtggtcctctgcaaagagcagcaagcagtctttttttttttcctggcttttcgagacagagtttctctgtgtcctggaactcacgctgtagaccaggctggcttcgaaatcagaaatccacctgcctctgcctccggagtgctgggattaaaagcgtgcgccaccacgcccggctcacagcaagtgttcttaaacgcgctccccccacccccctccagccagctctccatcccagtgtgtagttttgaagagaggcttcaggtcctgaaatctggcctctggcattaaattccccagtgcatcttgcctgcagccctcgcatcagctgtccagtcggctcctacttctctctatccttccacatttactaagtggaatccttcccttcatctccatctatctacttatctgatcattggtttatatcagaatggtcccacaagtacttattttattctctgtgtgagagatgtttttaaaacaggcaagcagcctccctgaatcgtgtggtgggatgtacctgggaaagcattggatcctgggaaagccgcagtagacagtatgtgtgtgtgtatgtggggagattcctaaggccagccaagatgggatgcagaaaggaaagtcagcaagggcggaattgtgggaaggtccacatcagagagaacatggaaggggcgagtgttcatttacttctgtcttctcagagatgagggtttactgcgaccaggatggagaattgacttttgtgatataatgcttggttggaatgcctgggtcctggagtggtgtttttgtgccctcagaatagttaattgtgctgtcttgcacacttgggagggcggggaggaaaggctttcggcagcatccctgacccctgactcttggatgcaatgatcaccatctcatgtctccagaggtgcccatcacaatgtccccagacagtgtcagatgcttctgggctgacttcctcccctgctggttttcccgtctgcatcccatcttggctggccttaggggacacacacacacacacacacacacacacacacacacacaaccagatcatccatactaagacccatgggcatgaaatagttcacaccagcctgccagtcaagaccattcttcaggagctgtgtaacttgctttttgttgttgtaacatacctatacctatacccacttagtgtgtgcacagatggctcgtacacacatacacacccagaggacaacttgtagaatgcaatcctctctttcaaccatgtgtgctcctggggtcaacctcaggtcattaggctcagtggcaagtgtctacccactgagctgtctcaccagccccaaagttgttttctgagacaatggaaccttggcaagctagcaagcctgtctcctttttcctagctaccgtccccatctttgcccgtggtttctgaggagctaaactcaggtcattgtgttacatagccaagcaatttaccaactgagccatccactccctcatgaaagaccttgatttcttgggggggacagttgatggttctcatagccttcatccaaccaaacggggagacacgttctaactcacagacggtgtgaagtgattccaaaaagtgcttctgtgtgtgtagcctctctgattcatggtggggggttgttttgcttttttcgtggtttctgtgtgggcttcgagaattgactgtggttgttatgacagttggggacacagaagcacttctcacccgttagtcgctgaaagcctgtttggtttcagtccaacacaacgcctaccaagctgggtgtacattggtttctactaaagtcatttcctcggacagctgggggacgtgaggactttttaactctctttacgactctcatttgtcttcgaagacattgcattttggcctagggtgtttttccccccttctttttcttttcccagttgttcagtatttctgacgttgccatttcagatctagcaaaggtgacaaaggttaagggagaagccaaggctgaggcctgagggaccatgtgcagccattgatgccatctgttggagactggcagaactgatacccttggagcacagtagatctaactgccagcttagaaatcagaccttgaggaattagcagagccacggagagcgctccatcatggaagtgtgggtctgtaaagtcagcgcatagtcactgtttgtgaaatttgattattgaggagcactaatgaaaacaatgaagacggtcgcacacagcggtgacaagattctctcttctttcaactgtcacccatttatttctgcaccaatcaagttaagccaaggtattcctatttctgatgataaaagctgagattctgtggctggcaatgataagagcactggctggcaatggtgaagtcatgggtttgattatcttcagtactccacaaaccctggctaggtgaggcacacaacactggggaggtagaggctggagggttcaaaatccaaagtcagcttagctacatagtgtgttcaaagccaatctgataggcctaagaccatgtctcaaatagatgaacagactcacagatggagcccatgcctagtgtggaagtttagtttcccagagcatcacaaagggaaagccaaatagatatcgaggcaggccagggaggtatgcgcctgtaatctagcatcttggaatgtagatgccagaaggagcttgagttctaggccaacagcaaaacctaactcaagtaacacaaacataaaaacaaaacaacactaaaaggtccctccttaatacccagaccaaatcccatggtatcaatggttaatgaggccagccaaggtggcttagcagatggcttgccagtgaagctggtgacctaggctcaagttgtcctttggcctcaaaactcatgtaatagcacacataacagtcacagagtaaaaataagacagtcagtccagccagttggtccttcattccagctatagataagaatccgtagagaagtgtaaaggcccaggggtggggcaggagggttggctcagctgttgtacgtgccaatgtgagcatgagtttgtaggtttgacccccatacaggtagagttggccaagggaatggagacagttggatccctgggctccctggctggccagcctagcctatttggtgagctataggccagtcagagaatcgaagaataggtggcacctgagagataaccatctaggttgacctctggtctccacatagatgagcgcgcgtgcgagcgcgcgcacacacgcacacgcacacgcacacgcacacacacacacaccctctagatagactggtcttcttgagcctgcgctaggtcatgagtgtcccttttaaacccttttgactcggcctctcgggcgaagaagtgttgttatccaaagtgtggcccgagaactcagaggcatgcgttacttggtaagaacctgagggtctcagactccaccccggatcagagtctgcattgtggcaagaccgacgggtgaagtctccacagggcatctatctcctcagaggcctggcttaaccgttaccactcctgtggcattcaaagcccagtttgcatgacctccactggggaccctggtctcccattggccttcaagactgtaacaagaagagaggtgggagctcccttctaagtctggctcatagcagcctagtgtttcattcctgggtgcgccataaggtagtcaccgagccagggctgtgggctgcttccaggttcctcctctgggagagaggtggcgggatggaatgatgatggataacacagaggtggctttaccttcggctcagcggctccttttgccagaagcaaggagacagaaacggttttttttttttgtttgtttttttattattattatttctaaatagaaagtctcgggctggtgagatggctcagtgggtaagagcacccgactgctcttccgaaggtccgaagttcaaatcccagcaaccacatggtggctcacaaccatccgtaacgagatctgacgccctcttctggagtgtctgaagacagctacagtgtacttacatataataaataaataaatctttaaaaaaaaaaaaaaaaaaagaaagtctcctgaaagtgcttactcttgagtgtaagcggggaactatagtataggtgcctgtctggagttggcgtcactcctaaggcctctaggccgggacgcccatggcctcagccaaacccatctgctgccttctaaaagagagagatcctttcagtccccgcttctccctgctccctgcttccttttcccttgtttaaagatgtgtctttattattcctaatcatgtatgggtggacatgtgggtgtgtgtaagattgtccaacgcctctggcctccctcaaggtacagttgcaggaggtcgggaacctgtatgtaggtgttagaacggaaactgtccctgtcagagccgtatgtgctcctgagacccaacatttgagccctgatccttctgcctcctcagacaaggtcacctgaagatcaccttgaactcctgaatctcctgcagcctgggtgctatgattcaggcaaagaccttcctcgtatgtggggctctttttagcttagttcttaaactgcagtgtcagggcgggcttttctaaatctgtgttttcaatccagtaggtcttagatgagacacaggcgtccctgttctgggccttttggggagatccaaggccttggcctcttctgcctttttctgagtgtggggttggggcaggagaagggtgttgtctcctttcctctggctcctatacagcttccaaacttattcctgtaggcaaacaactccagcccaaactttgagaaacaagcgagatctgtctcttgaaaggacgcccctgagaagagccctctgtgccccacccctcttgggaggtctgtgtggaagtgccctggagagacctggcactaattattctcacagaaaccattcagtagttgccacccatctgaggaccccacccccactgcactcctttgaattgggaggttttgaaaggatccaaactgggctcaagacttgagtcttttctcttttctttttttctttaattctttttttttctccaacttttctcatcaccagagctactcctctgttgcccacagcaaccccagtggctggttggtacctcagtatggatgaaggcagccaggatacctgtgttgagtgatgctgagccattcaccagagccacaaaagaaccaggtttcccccattccttccgaattccaaccaccatcagcatttagcccatcttccctccgaggcagagactccgtctgtccctccgttctcctcctttggaggagtctgtttaccaacagtgctttgtaaactctcacacgttcccttctgttcacacgttccatccacactcacaccctggcaagcctccgggaagggtttcagcttcaggctttgcactcccgtgaaaccagcagacagcccagggcaaggatgctgtgatacagctagcagccatccatgccatagactgggtagccagggtgcaggattttcctctttctgtcacaagaatatggtttgtcaaaatgaaatggcaaagttgtcatggaaataagccaccagctctctgaactgaactaaccctcggcggggaggaatgcctcctctattaatacgtcttatccagtttacaaatatgcgtgtgatggctgctctccttatattcgttcctctccatgcatgtgtgtgtgtgtgtgtgtgtgtgtgtgtgtgtgtgtatgtatgtgtgtgtatgtgcccatgctcatgtgtgcacaggttcacatgtaaagaaaaggtcaacctgtggtgtcctctctgaagaggcagactccctttttttaaaaaaaatcttttaattgtcaattggtatattatgattctttgtgtgtatgattttgtgtgcagagacagctgtatgccacatgggctgttgatcaaacaacaaccttgtggagtgggttttcctctcccaccgtgggtctagaggctcacactcaggctgctaggcttgactttaccactgctttttacatgctaagacatctcctcagacgcatcttggttttctcgagacaccgtctcactgaagcagacatttgtctcaggctagactggtgtccagagagcctcagagatcgttcagtctctccctccccagctctgggatggatccacactgcatctgcacccccacacctggttttacgttgggctctggtcctcatgcttgcacggcaactgtgtaccaaccgagttagcaccccaaccctcgagttattagagactttccttctcttaggctgtattaatagacttccggaacaaatgtcagcaagtagaggaatggaaggagaccaaatgaaagatggtaatttttttattttctgaagaggataaagaaaaaagtaaatttggaaacgtcaaataacgttccttattctttccagactctggtttctaaaagtgcggttcctttagattcccaggcctgccctgttctttcggcatttgtcaatgacgtgaggcgtgctttgagtgaaggcatcttccttcccctgcactgttcatttctgtttcaatggcttgcctcggtacttttctttaattaatactgtttatgctccgctgatgaataattcacagtcatacaagcaacagatgtcagaggattcaaaatgattttctctgaattatttattatttccaaaaaagtaacaggtttgttgagcaagtaattggcaatacagctgtagatcaaggtttgtccgtaggtaacaaggtctcccacgtgttgaagtttgtgcctcttaatagccagggctgcactgtggggtgctagcttgatgccacggctcagggagtccattatctgtcccctcgctgacaagctgggccctggtttggtttccaggttagtctgtggctgttgaaaaaaaaggaaattcatctcgagacagctaatgaatgcaaccttgcaggtgcttctcagacagagacctcacatcccccacggaaacaagtgacatctttgtttgcaggaatatattaagcatagagactcttgccaggtgtgatggtatatgcttgtgatccctgaacttcagaggtagaaaggcaaagccgggcagtggtggcgcacacctttagccccagcaccggggaggcagaggcaggtggatctctgagtccgagactagcctggtctacagagtgagttccagaacagcctgggctacacagagagacacaaggttgaagcaagaggataagatctaggataaccttggttacatattgagtttaagggactgtttaggctaataggattctgtttccaaaaacaaaacaaaacacaacccagcgacatcaaaggggcagcagactggagatgtggaaacagaagaagaagcacagtatctgggatgtacaaaaacatacttgtaagactattctctgcagttccttggatggttggctattacatttatttatcgtgtgtgtgtgtgtgtgtgtgtgtgtgtgtgtgtgtnnnnnnnnnnnnnnnnnnnncacgcagaggtcagaagaaaatgcaaaggaacgagttcttccctttagccatgcaggacccatgaattcaactctggccatcacagtgaatggcaggctccctgagccatctcactgacactgtgagtgaattttaaaacatgatttatttatcttatgcacatttgtgttctgcctacatgtatgtctgtgtgaaagtatcagatcccctgaaactggaattacaaatagctgttagctgccatgtgggtgctgggaattgaaactgggtcctttgggagagcagccagtgctcttaactgctgaggcatccctccagcccactctatgaatcaattttaaaaagataaaaccaaaccaaaccaaaaccaacaaactgaaacaacaaaacaaaaaacaagcaaccagacaaacaaatctcccaaaatacagactcatcaataacaacaaaataccaactttaaaatctaacagtaaaaaatgggttataccaattctggtgaaatattatatagtcattaaaaagatatgccgatttatttttttatttgaaaaactattagcaaattaaatagaaggtagtattaaatgagaaaaataattaagacattatggttttatttctgcagataatatgttctggggttgttgctgtttttgcatagcaacaattctagaaagaatttctctaaaacattaataatggctggctaggaagaggaagacccagagtgattttttttcctctctgctttatatagttttagtatcttcatgataaatacaggttttcagtcatcataaaaggtcaaggtgctaaaacaagacattcaattatgtcatttaaagaagggaacgcctgcacttgaacgtgtattctagaagggcagattctcttttgcctgtgacctctccattccccaaggtcttgtcaccttctaaatggccagtgctgagctaaacggcccagactgtcactaggagcagtgggtgtggggggtgcagcttcccacctcatggccctgtttctacagtagcccgaatcactccagatcttgtcccttgtctgtgctccgatgtcatctgtgagggagtcaatggtctctctctctctgaccagctacagtgctgtcctgccgaaggaagaggaaatgaattcttctgtgcagcctgcagtccctgctaaatatatcacctgtgtaataagacaggggctgaagaaattaacggaagtaaagttatagattaggtgtcttcagcgggcacatcctttgggaattaaacagacaggagggggacgagatttgttttcctgggggtgacaatctggctgagaaatgagactggcagaagaattcaaaatagtatatgcgacgtaccagaagaatgccctaagaagtgcagggcggagctttggccagggtcacgaggtgagcggagtttaggccggggtcacgaggtgggcttagaggagttgacaaacttgctattttgcttcagagagctgcctggggtgctggcacttacataagaaataaatttatttgtgctttgtgacatttcaaggctagcgtgaccttgtacaccacaggggaatagaattatatttgtctattgaccaaaaaaaaaaaaaaaaaatcaccgtacgtctctgagggagctttatttacctgtaagtctctgttaaatatgtagcgacttttcacataaaatgtcttggaagaggagctgtcatcatcatgtgaaaactatctcttaagaaaattattcatgaagccaggtgttggtggtgtatccctttaattccaacattctggaagcagaggcaggcagaactctgagttcaaggccagcctggtcttcagagcaagtttttaggacagccatgggctaaagaaactctgtctcaaaaagcaaaacagcaccaaaaattattcctctgtgtgtgtgtgttcgtgagttctctgtgtgtgtgtgtgtgttcgtgagtttgcaaatgtgcgtgcacgtgtataccacacgtgtgcattgcccaccaaggctagagggggaagtctgatttcccctggagctacaggctgtgtgaaccatccagcatggtgctaagaacagtaaatgctcttaagctctgtcccatctcctcagccccccaaaccatcttttaaatgaaaaacttttcagctcttacttatggctctgaggtattgaatatggttatctcacacagattatttctaaggtacatctaggagaattgttcctttgatagaagatgatgatggtggtggtggtggtcatgatggtagtgatagtcatgatggtgatggttttgatggtggcgacattggtgaggatggtgatgatgttgatggtgttgatggtgctggtggtgatttaaaatagtctaggattcattttgtctgtgcatgcagttgcagttgtcccaggggatgagaaaaggaaactggatcccctgaggctagagttacaggtagttgtgagcttcccaacttggatgctaggaacagaagctaagtggttaaaggcatggctttggaggacctacccagatttcattcctaacactcacatggcagctcacaactgcctgtaactccagttccaggggatctgacgccctcttctggcttttgcaggtactgcacaaatgcagcgtacataacattcattcaaggatccttattttaaaaattcggctttatgcacagagctttccgaagcctaatgagcttctatttataattctagcccataagtgatctcttacaacacagtggacacacctgcttcggatggggttttcctcatgtgtcatgcagtgaaataagatatttgaagagaaacagaaaaaacaaatccccaaacaacaaaaaactaaagccaaaaccactcactgttttcgtagtcttttttggggggcaaaggttgcctaagaataattggggcttcttatgcacctgggggctcacaactgcctgtaattctagctctggggcttcagacagctcttgtctccacacacatgcagaggcactcacacagacacgtaaatataatttagaaataataaaataatctttaaaaagtgatattacaaatgaggcctacatttgaaaaatactgtgttgcctttaacactctgaaagtaaagatttttacagctgggaagacctttaaaaaccatctaattgtctggttttacagatgagaatctgagctatgttaagggtcaagtcttactgtaggccgggtggcctgttctctgttctcctggctccagattcctggatgtctaatgcagtcactctgcctgttacccagtttgctctcactgctggtaggaatctcaggtagaattttattgttccctcccttcctccctccttctttcttttttaagactgtagagtctctggcttgtcgcattggactgtgttggggagtgagctagaggacctgttgcattctctgcatgttctgcaggttgcaggatgtttcaggaaggacaaggaatgtgttttgatttgtatgaataagaagcccatttgggacagaagtcagactagcggccaactttgtcagggtgtttcacagccaaagcctgtgtagaaaaaaatccttccctctgtccaccccagttcagaacagggagggtcggaatcacagtgatgacagcaacaacatttctttctcatcatgagagcgccccaaagcagtgttaccttttggaatacgattctcctgaggatgagggtggggccggctcgtggaagggtgacaccagttcagttcttagaatattcttagaaaaatacttgtgacctatataggcttattgatttcccagaccgagaaaatccatctggctgtctatccatccatcatctactgaccctcctgggagccaccagggagcgctccctgcagggctgtcagcacatacttgtgcctttgtgcccagggcatttggcttcacactgtgggtcttttctggttgtttctctctctctctctctctctctctctctctctctctctctctctctctctcgacagggtttctctgtatattcctggctgtcctggaactcactttgtagaccaggctgtcctcgaactcagaaatccacctgcctctgcctcccaagtgctgggattaaaggcgtgcgccaccaccgcccggctgtttttagaattttgtgtatgagaaaactatatttctctcatttctccccttcctgctctcacctctaatggctctggtgtcctctctaccccttctcaaatttatatcccttcttcatcattattattgtcccatatatgtatgtatatatgcacatatgcatgtatctatatgtgtgtatgtacatatatataccctactgagtccaatttattaaccatctgatctgtatgagtgtgtggtacatgtgctacacgtttgtgcccatgggtgtggtgcatacatacatataccgtattgagtccagtttattaaccatctgatttgtatgcatgtgtgtccatgggtatggaagtcagaggcatcttctttggtccctctccaccttattttctgagtcaaggtctctcactgaaccagagccccctgccagtcagactggctggccaatgagctctctggaccttcctgtgtctctctgtccccccaggactaggataacacgcggccacatctgtacctagcttttttttttttttttttttcctgtgactgccagggatcaaattcaggttacacagcaggccctttgctggctgtgccctctctccagtccctctgccatccctttttcttttccatgcgatgagcgttaacgctcctctcagagacttgttgtttctgctcagctttgcctaattagatttctctgaagcctgaggtcatttataggcattttttccacattaaaaccatgagcctctgttgagatgttttgtggttctaaattgggaccatcctgccttgtcatcaaatcattcatccttacttcagtcagtgcgtgcgcgggtctgatcctccggggggctctgtcgttgttcatttacatctgacctcgttctggggaatatttaaggctgaggagctaatttaggacgtgctggctcttactctaccaattagtctggaccggcggagggggacacacaaaatggcaaggtctagggaaataagagggaaggcagtgtctcatgtagcccaggatggaccttccctacgtagccgaggatggccctgaacgtcaccttcagagtgctagaattgtaggcatgtaccgccagactggctttatgtagtgctagggattgaacctagggcatcatcgtacatgctaggcaagcaacctgctgaatagcctcagtgtcaagactaccggggttcattttattttgacccttggaccttgtgtcaaaaaaagatggttacgtctaggagtcttaccttaagaaaagggtgatagggaactcaggccagatgagtcctgatggggagagtcagaggcaggacttgaacccaggctgttagccacaagcgcctccatctaaccacgtggctacagcacctcatcgcgtgtctgtgtgcgtccgtctcctagcgcaccaccccaacaaaaggaaacaaccccaggagctttccccgggaccacagtgggaattgcgtggagcgggtggaacacgcagaagctcccatcgcccctgggtttgggggtgtgtgtgtggttttttttggttttgttttgtttttgcgtctttgtatcccccaggcagtgagctggattccagagcctgggagtccctcagaagctgggagaagaaacaacttgcagaggcagtgtcgggagcgagggacatcggagagagggggaaattattaaagatgactctgaagatgtcaagagtaaaaagaatcgcagtgtgtgcgccccggcctgaggatggcatctctggggcagcttaagttctttagtctgccgtgtggattaaaggactgtgggatttaataacgtgtgccttaaagaacggccctgtgagtaagtgttcccctgtcgcaaagatgtgactgctctaattgaatttagaagcagtattaaaattgttcttttggtgatgtttccgaggtgcacgaaataaagcatccaaagtcgccattgattaaacgggagctttaccatgtgagcgttgtaaagcactaaattctgccgccagcaggttttatcgcggttcttgcgaaacaaagtaagaaaattctccctttacataatttacggtcacgctgctgtttaaatgtgcccaaaaacgttcttcagaatcttggcagtgttttagaatatagtatattatcttagtatatatatatatcagtatgtattgatggtgcttattgtgtgagccgaactcgctcttatggacgaagggaagagtctgataccctcatggtgctccgtgtgcttgcattaacaggctgccttgcttgttcgtcctccttttcaatctggtctgcctctagtttcactgagcttctgtctcccacagaatcctaaggaggacagggctggtctgagactgtcccagagttctgctgcctcatgtctgtttcatgtcatgcttccagacccagagggactctggaatcataagcaaaaggggagtttttctctccttggagacaggatctcatgcttcccaggctggcctcaaacttactatgtagccaaggctagcctttgtgttggggttttcaggggttggccacttcaccttggcctttcctttcttatacctctctcttctccctccctttcacctccctccattcccccgcccccctcccctgcatccccgaatccccgatccctgaattgccagagatcagatccagggccatatatataacacattggctggcacactgaactggaccaccagaccccatcttctccatcctatccaaggacaagcagattcgacaaacacgaggctgaaaggagacagggagtgtgtgttctcagtcctcacacactgaggaagagttgacttatgggcacctaagcatttagagtggtagctgtgggcaggaaggaacattaaggaaatttctattatctctcatgcagtgtgccagaaagggcatgctctgaggtagactgctatacattgagttatttacttatatgctagagctcaaagtaccttgagagtgctagatcaatactctaccactgaactacaccagtagcttgtacaactcattcttcaatgggcgtatgggtgggaaacactatagattaagaatgctacttacggggctggtgagatggctcagccggtaagagcaccaattgctcttccaaaggtcctgagttcaaatctcagcaaccacatggtggctcacaaccatctgtaatgagatctgatgccctcttctggaatgtctgaagacagctacagtgtacttacaaataataaatgaataaataaatattaaaaaaaaagaatgctacttacaacttttccatatacaaatacattttaaaaaaaaaaatcacaccattaagttaaactcctcctgaccaccatggataaagagcccattgttctgatctggagacattcctgttttgcaaactcacaccatcaaaacaagtgtgagttttctctggctgcacccgagctcccaggatgccccccacacacacacacacacaacgaggtgcttccctcggctcttctggagtgactggactttaggtgggactgttaattgcaaaatctgaagaggggaaagtttacgttttgtcagctgccaaactctggacttcacggtgaaccgtcaggactaactttctaggccaagtgtaagcagctccgccggggctgctgatgtgagggtggaggagcgtgacattttatttagatgcttggccagagttcagacccatggactctagggtcagcctccagagctcaagtgatttcccctaggaaaatgctttcctgtccctagcccttgtacaggatcaccaaacaacttgctggtggaggaaaggggctagaaccacagatcagaggagaaaagcttcggttccaaagagccattgccggctgaatttttctcttgttggagtcatgggttgttttttgttgttgttgtttgtttgtttttctattgttgcttttgttttgtttttccagtagaatacggaaaaaaaaaaaaagaaggaaaagataaaagataactccgctttcgaaataatgtttgagtcaactcagatctaagagaaaagctgtgttgctcggctagcaaatagtagcgctggggattcgaaaggcggccccgcccccctcagcatccgtagaccggttgactgtcctgggcctggagcctatcccagctcacctcggttgtttggaatgctctctggaagctggcagcgcgatggttatgtaatgtggactctgaggcctgccagccggccctcagcaggtcctggggagatgccaggttctctggagcctttcttaagctagctcagtagattgctgtggcctcaagtacacactgggcaccgatctcggccgtcatgattttacagactgagacagtatcctcagtaaccttcaaccacacctgagcatagttaaccaagtctggccccatgttgtgtttaatttttgaaattacagccagatataaacagtaattaaatgtgtgtgtccgagtgtgggtatgagcatgtgagtgcaggtaccgtcaggggccagaagagggcgtcagatcccctggaggtagagttataggtgtcagtaaggttcctatcgccgtgttgggagctgagcttgggaactcaaataagaactcttaattgatgcgtcatggctctggctcctgtgtgttgggtgcattgggagggtagctgagcttacagatgtgcacttgtggaggtcagaggacaagtgttaggagttggttctctcctgctgtgttctggagataaaacccaggtcatccggctagaaggacgtgcacttttatccaccaagcgatctctttagcccttttgttttgttttgttttgttttgttttgtttttcgagacagggtttctctgtatagtcctggctgtcctggaactcactttgtagactaggctggcctcgaactcagaaatccgcctgcctctgcctcacaagtgctgggattaaaggcgtgcgccaccaccgcccggcccagccctatttttaagatcaagtaatcctcccttcttcctctaccacattttcttattcactcactgaacttggctggcttctttatcggcttccttaacgggatgctcaaactcctgagtccctgcttccactgcctttggtgatatgcccagaatcggaattgctagattacgtgataacccaacacccccgcccctgcccgtccccgtccccctccccccgccccccacaaacatgccttatcttggattcctatttatttactatttttaagaaagcaaagtaccctgagaaacttggactcacagaacccggttgcttgctctccttcctttccttacccttgtggcatcagcttctggtgttccgtgtttcgtggggaagggtggccttgtttcaatttgacccctctcgtcatcaattcctcccttcctcttccttctctttcatttttctttacttttcctttttgaactcttggtccagacacgctgctcctgtggcctgtatgggaatgggtacttcctgcgggctgcagaggggaatcccaccacccccaccccacagccgactggtgaagggtaatgtcctctggagaggctgatgcggcaggtttgaggccaggggagttctgcaagcctcttggaggtttactgcacagccttctgggttctccagggttccatctctgaccggatcgacagttcatttcccctgcttgcctagcttcttttctgactttttggacttctctctctttctttccttccttccttccttccttccttccttccttccttccttccttccttccttccttccttctttccttctttctttctttctttctttctttctttctttctttctttgaggggaatattttgttttgtttttgttgcttttggcttttcgagacattgtttctctgtgtagccctggctgttctggaacttcctctgtagaccaggctggtctccaactcaaggattcccctgcctctgcctcccaagtgctgggattaaaggggcctggccttggttactgttttagaatagattttaaaccaaccaaccaaaacaacctcagccagcatttaaaaggcttggaaataatctcactgagttgccttttattttttattagttttgagttttgaatgaaaaaaatggattattttgcacttttgggaatagaatccagagccatccccatactgagttaatgcttaaccactgaacttttgaaccattgaacactttctacacacatgcgcgcgcacgcacacacacacacacacacacacacacacacacatttggcctaggctgagcttgaacttcggatccttctgcctccatctctccggtgctaagattacaggtgtacactaacccccaattgattcaatgctggtcattaaacccagagctttgtcaacactaggcaagagctaccaacttacctatgtccccagttaaaaaaaaatgaacccacatgatatactttagaacagaacgtgagacctgggccacacttatgtgtgtgtgtcattatccaaccataatgacaaattattttatctgtcagcattttttttaatgaccttggcttcaaaattagaacacagatagcaaaccagctggaagaatggaattaatgatattttaaaaacatcccttctgactctgggaatgagcaggtggaactgaagggtggagggtggagggggacctggagacagtaactggaaatgagcgacatcgtgttccagcaggaatgagcaggtgggcgagaaagtcttcccacagggcacacctagcaatgtctggagccccagaagcagccgtgggggaagttctgatcagcaaataaaagggcagggaagaaagatctagaagtattaagaaaacaggaccatcatgccagggggactgttacggagcccgccggccagggtctggttccaatggaacacaccatgaaaactatcacctccaagccattccaccttaggtcaaatcagcttttctccctggcctcttcagacgttatttgtttgttcctcctgtgatcctttctgaggagtgtgaatggctctaggaagggcttgtttttgtcacgtcccaccattaataccatggatctgggagctctttctggttgccagagaattctgtattgctctgggcacaaaattttccttcccgggtgattagttaggctcaagagaaagagaaaggaaggctgcctctcctcagccagctctggcttctgggcctgggaagagggggccagcccccatagcgtgtggccatcagaatgacgcatgacatgagaggcgtgtgaatgcagccggccgccgcagctggttcccaggaacacacaggacacgaagggctgtgatgtaactcagatctgccagatgtgggagccggcatgagtcatgccgggagagtcgttaagatgtgccttctgggtcatctgagcacagactgtaggccaccttccctgccattcggggttatgggcagcaagtccacaccccaggaatcccccaagttcactaacatctctcggaaatcatagcctggttttctgcggcgacgcagcgcggaacctctgtaatcccatggtcttcagcttgttattcgttaaaggattttgtccctttggatgatggaagaaaatcagacactaaaaggggtggggatctgacttcatagtggagcgcttgtatatcctcggattgtccgcccaacactgtaaccccgccaccccaaaaacaggcgctgagttataaggacatctacacacatcctagaacgatcaggatagggatgcgatgtgggagaaaggaacactgttggcaccgtgccagcaagaggcctggcactctgatcttgtactttattttatttttttatttatgagtacaggactcctcatggtgattaatgagtgctttttctgagaaactgtaaaccgacctttaaaaactttctcacaaacgtgtgttatccagtcaggaaggtgtgtgcttggctgggtggatttcctaccacctaacagtagagagtggtgttagtggagctgttagggtcaaggccttaacaagctaggctctggcccactatcctctgtaggccaattaagaagtcaaaagcagagaaagactcattcaatctggccacattgggaagaggaacaagaacagaggccgttgaacctgcagtcttcagagagccaggagaaggtttgtgtttagacaggggcaggagacaggcatctgtaagcagctcatgaccaggtgtgctctgcccaccactggcctaacatcttctccccttcagcttctcctgcagggtgatctgaaaggttgtcagaaccatgtgtgatctctgcctgagagacaagttccccgctggatgcccagctttcagccctcccctcctgaaagcaggagactcctagtgggggaattccaatttcttagggttgctgtggtgcctctctgtagggtatcctcacttctgccaggatggttacagtgtcctctaggaagacacagtttaatcagggagagggaggtgatgctatcctgatgacctgtgtaccctaggtctgatgaaaggtgtccttaaagggagctggagagatggctcagtggttaaaagcactgactgttcttccggaagacccaggtttgatttgcagcacctatgtgacgagtcttttaagcctagtctcagggtcctcattacgccattgtggtcactgggcacacatgtggtacagacatgcatactgataatacacccatatacatagaaacataaataaatctttaaagggagggccccctggaggccagcctggatgaggagaacacagaataagatggaacgaaagaaggccgttggttgaacttccagaactgtacaggacagaatggtagagctggctggcttggaacacatacgtgaattgccttgcatagacaagcaaaatatgtcccaaagtgacacaaaggttcttcattgccttcgcctcctcatgtgcctgggtccctatgtttttaaaaacaagatctcaccacagaagatggcaaatgcttgaagagtgcagactggttctcatctgtagccagtctgcccgtgactaaaaagtaggcctcatcctcctgacgtgccacctaaaccactgcagacatctctgcaatctcattttaacaaaatcagaaagcagtggttataacagtggaagagggaccgtgatggagaaagaaggaatgaagaaagccacaatttttaaattaaattaatttttttaaattctaaattaaaattaattttaaagtaaacccaggagcatggagggagctttatgaagaaacattgataattaagtaattaagacatagcaaataaagcaaggtgggggtctgagagagaagtagacacagacagtggaagtcatgtggaaggaggccgagcccggggtgagttgtggaaccagaaggaatgcctgcagcttccagaagggaagagtagattgtcttctagaatcttccgaggaagcttggtccttcagacacctccatttctgactcccagcttctggaactataaagaataaattttgattttgttatctgccacctctatggtaatttactatttggtttagaagctaatagagtcatcacaccctgttcaagaacaaggtatcagcaccacccagggaaacccacctctctctatcatcccgggatcaccactgtgctagttagatgtctcagttttcttgttgctgtgtcaaaatacctgaggagaagcaacttaaaggaggaaaggttattttgttttttgtttagtggggatacaatgcatccccacttggggcaggaagacttaggtctggttacagtgtagccaccacaatcaagaaacagagagcaggtaagacatggtgctaaactaccaaaactcaaggtccctcctcttgactcacttcctctagcaaggcgctacatcctaaaggcttcatccagcgagcatgagcaaaacagcgccatcatccagagagcatgagctaacaaggggggctggcttttcacatccaaaccacacaggctttatgtccgttatgcatccttaaatggaagcatacagtaggtacacttacttctttcacttagcgctctgtgggttgtgtgtatgttttggcgtagtttctgagacagggtctcactatgtagcccagactggctctagatatcttgatttttctgggatcacattcatgtaccaccgtgtccagcttgcattgggtttcatcattttcctagctgtatacagttgccccttattttccatggtttctattacctgtagtcaagtgtggtctgaaaatgtgaagtggaaaattccaggagtaaacaattcaaaaaaattgtacttattccttttttttttttttttttttttaaatttagccctggctggccttgaactcatggagatctgccagcctctgtagactgctgaggttaaaagcatgagccatcacacccagctacctgattttttatttgtgttgtgttagcgcactaccacgattggtctacgtatattatcagttattgttgctattcttttattgagcctgatttgtaaatcatagtcatatagaagattcatagcagtatacaggacttggggctaaacacagtttccagcagctatcgggggcttggaatgtatcccccatagctggtagtgctgctgagccccatgcctctgaagagcccattacagggctcccagggctgagcagacagcgaagccgaccaattttctgagaaccggagagctgggctgccgcctgtgaattttaaacattcttaacccatcactggaagatgactgaacagctgccgtaccctccgtctcaagtcttagaaataaatttgcatgttttaggagctccagccccagtcctcctctgtagctctctagctttgtggatgccagtgatgcatccacacatgcacggatagtgttcctgaataccctgctctgatgagccttggaaatagagccaggaacctcatagaggatgagattaaaatccagggccccagctgttgagagatgagctgtctcatttgcctgatgtgcccccacatccttatggaggtgggggaggctgagtttgaactcaaaataccagaatagaatagggggcgggcaggtgtggcaaccacaccctggatgctggtttttttcctagagagataacctttggtggggtttgcggtggtagaaaacccagtcattatgacaaaagagaagtcactatttttctgatacaaaagtagtgtatcttcctttcagaatgggaaaaatccaggcccagcaagaaatatctacaaccccatactgccattagccactgttgaatatatttgcatatacaaaccttcttcatatttaaaaaagcatttagttctctgcagtcaataaatatgccaggtgctggtccctggggatttagcatgaataaaattgtgcttgttctgatggaagctgatatcccaagcaagtatggtccaggagtggtgcagcatgcctgtaatctgagatccggggaggtggaggttgcaagattggaagttcaaggtcagcctctgtcatatagtatagcaaatgtaagatcagcctgggctgcaaaaactaaaacaaacaaataacaaaaccaaagccggtatagacaggatgtggtagtacatgcttagtattaactgatttttctacccctttccactgcaacagatattccagaataactcatgagtttatcagtgagtacaataactagacagaaactgctggtgagcagcttctgagatagtgactgcacggtcagcctgggtccgagcaacccggttgatttgctgacttgaataaacaaaaaggaagctgtggcttctttgagccctggagattgtatcagtcagttgtttgttgctgtaacaaaataccccgggtggctagtgttgtaaaagaaaagaggtttatttggtgctcaggtttggatgatgtctgcatctgtctatgtggggtgagcttaatcaaatcatggcaatggtagcggggtgcagggtgcgtggaagcacaccttaaaatgttttattttaaacacttggtgtgtagacatgcacacacgtgtgtcgtagtgcatcttgtggaggtcagaaaacccctttggggaatagttctctccttccgctgtgtgcagcaggtccctttaaccttttatctttccagtccctggatcacatcttgcatcctgatacaggaaataggagagcctaggggtcagctgctggattttactacagttcactctcagtggggttcatgagacaccccaaacaaggtaaagagtttcactttccaaggtctctacactgagaataaatccttcaacacaagggccttttagagacaaaccacatttatttgaacaatggtagagagcttggggggtcaagctccaaggatacagccagaggagtcacataacatagcaccccaaggagagcctagctagctctgttgcagtaacattaatagattccttgtttgtttcagctggagtggagtcagcctataaaatgcactgcagcgccaatggctatgagggtacagtgcttgtctgtaagcatggagacaggaagatctgagttccatcccagtgaaaaagccaggcacatcatcttgtccccagcaccccagggctgacaaggtagagatgagtgtatccttagggcttgttagctgtctgtttccgtgagggatcttttcttaaaaataaggtggggcacaacttggcatctacctttgtcttcctcatagcacttgcacgagtgcgtgcacgcgtgtgggcacacacacacacacacacacacacacacacacacacacacacacacagagcaatgcagagggaagacagagcaagacagcaggtgagtaccccattttttctgatcccatagacactccaggctgaatagctcttcgcacaccacctttctgcagtgcctgcttttagaataatggaagaaaaggatgctgggaggaaggcaggaaggaaatctctgactcacccagagtgtacagagatgcttcctgcttaagggacagacagactgcagtccaagtcacggactagagatgattagaaatgtctaaatatgagaaagcttattcatatataacctctttttaaaaagatctacttttttggtttttcgagacagggttccactgtgtatccctggctatcctggaacttgctctatagaccaggctggcctcaaactcacagggatctatccgcctctgcctcctgagtactgggattaaaggcgtgcaccacccgtgtccagctagatttattttattattatgtatattttatctcacagggtaaccatgcctggctttgtactcaaagatcttccagcccccgcctccgaagtgctggaactaaggcatatgcccgccaagcccagctaaaaatttatttttaagtttatgtatgtgtatgagtgtgcccacatgtgcgtgtaggggccttaggaggtcagaggacagggtcggatagctgaagctacaggtggctttgggccaccagacccataagtactgggacctgaacttgggtcctcctggaagatcgatagtgctcttaagagcagtgccgtctttccagcccgtgctttattccattttttcctcctccttacacaaatcctaagacatagatgaaatatgtgtgtgagggttgctgggaattagattcaagaagcagatttactggcattgaatagctttggaaaggcatcctgtatggtccttgtcactagaggcaaggggacaagtcctgagtgggggtgggagaggtggggcggaaggtccgaccttaaaatagttccctgtgagaaacaggaccccgaaggaaccgttccgcagcccctatctccctcctcatctcctcttacatttgtttaactccaggacttttgggccctgctttccataaaatttattatatggaaaatatttttggtcctttagctctcttaccaaatttgaaacattttaactggctccaagaggcctttaagtcccatgtgtggctatcttagagttgagtcatataaactttattgccagccttggtgaaaactgcattgcgttggggtcacttgtgacgtgtgtcacccccaagccgggtcccactctccctggggttgccatggaatgactgagtcaacagcctacttcgagaagtggaggagccttcacgggtgctccgtggcgctgtgctcctgtgagatttgccatcaaagttttaatagcaaaaaaaaaaaaaaaaaaaaagttatgaggatggaaaagcttaatgagatgatgtcaggtcacagggtcatttctacttagactagagatgagaaggttaagggtcaactgtgggcgtagttcagcgatgggacactcaccaaatatgtgtgagaccctgctcccacccccagggagaagaggtgaagagagctaagataaagagggaaaaaaaatatatattaagaaggggttggggagagtaatggagggannnnnnnnnnnnnnnnnnnnnnnnnnnnnnnnnnnnnnnnnnnnnnnnnnnnnnnnnnnnnnnnnnnnnnnnnnnnnnnnnnnnnnnnnnnnnnnnnnnnnnnnnnnnnnnnnnnnnnnnnnnnnatgggaaataccaatgaaatattcttcatatatttagaataaggagtttcctcaccttcttaattctgctattcctatatgaaaataaggagagagtttttttttctcctgaagtgtgttaaaactaaggatctgggctgcaggcgtagttggtagcaagtttgctgaggacacttgaggccttgagctctatccccaacagttcacgaagcaggtgaggtggtgcgtgcctgtgatcccaccatggggatgttgaggcagggggatcaggaattcaatgtcatcttcagctacatagcaaatttgaggccagcccctacctcaaaaataaagtaaaaagtaaaatagaggggaaaaatctaagataatgaagaaacttggaaattttatcttacatagaatcagatttttaaagccacctcgtaagaaaatgcaggaccccgttttttatcatcctaagatcactccatattttggaaggttctggaaactttagcaggcgagagacttagatccttgagtatctatctcatcccaggatcctctcctgttttgctcttttctgtctacaatggaggtaaagagagtttcctgccattggctcttgctgcaatgatgctctagagttgagccttcttaagcaagtaattccatgaggtcttatttgtcaatttctttttccctagtgacaaaccattgcctgttgtaacgtgaagctcccccaccctccaatccagtgttctcttttacaaatgctgcagtgtcaggccttacatttgagtccttaattcattttgaagttttaaaaaaaaaacttttttagattttatttttgtatacaggtgtttttgcctgcagtatgcagtgcccttagaggccagcaaagaacattggattctctggggctggagttacaggtggttatgagggccttggaggtgttatgaatccaaggttcactgaacagtaacaagtgctctcaaccactgagccatctatccagccttcgagttatgtattttacatgtacattttaaatttgaggcaggagaactaataaggatttttttttttaaatttccagcaaaatgctacacggtctctgtaagaaaaacatgaaacaaaacagagcctggtctgaccaggtgactgtgcctccctcctgccgctggcagccatgtctgtgtgtcccccatcggcgagcctcttaatcaacattaccggatcatatactgtttcccaatggatgtcttcccattggcttcccactaatcagtaagaaagctacagattgaatttgcttgtctcatacccttcagttgtcctaaaagtcagttgtttttggttttgatttttaattatgtatatgtgtccgtggaggccagagatgttggatccccaagcactggaagcgcaagttgtgagccactgggcgtgggtgccaggaatgggactcagactttctgcagagtagtggtgtgtgctttcatacagtagtctgagccatctcttatgtcccaaagctaagaattctaaacaagtattctgagctcttctctttgctccttttgttatcttagataatattttagataatcttctccttcctctctcctttctttcttgcttgcttacttgccttctttgacgtgcctcgctatgtagaccaggctggcctcaaactcacaataatggccttttctcttttcctggaattccttctttttcacatggaagaaagtaacccatcccgagctgtggccacgtgacgcacgccgcccatggtctctccttcccttgcagtgtcttggtccagacattattcaggctctcccttctgtttgggtcctttgctgtgcagtggtatgaatgaatgtcaccacagcttaggaatccagaagagcacgtctggcctgccctgctggaaagctccttcccttgggtcctctttgtttttgcctcagtttcttcttctgtattgtgaccaggatcctaattgtacccacctattggagttattaggatgaattcaagcagctattgcgggaaaagctcttggacagcttctggcacattctagagtggtctgcaaagcgtttttcattaaggtgaaagggcactctctgtgccttggccttctgcgctctccgaaccccacctgggctgtcagtaaagtaacaggatgctggctcccatgccagggtaaacaaccctggccgagccctgggcttatgaattattccttagcaggcttcttctccgatgacttaaaatcgtaatcaatgatagaggaaggatttactgctttttaaatttcttttttaggtcactaggctggcctcggttctctggctatttaggaaagcataatcctttccagggaatggattggtttagattggaaaggggaggggtggctttgggggagtaagagtgcaggctgcagaggaggtgggaaaatttaggaggtgagggattcggggaagggattggctccaggacagaagtgtctaatggcagagccccaggtgggcagtggatgctgggaacataggaaggaggatcctggtgtgcacagcgagtgtcaggaagtgacgtatgcatgggtgaggagtcataacctatccttgcctttcttgacctttccccaaaagacactaaagatggggaggaagggctgggagcttgtggattgtttggaaagtttaagaggggtgtggacggaggagagagcaggccagatttatatagatcacggagtgaaaaccccggaagtgaaagtcaggaggctccagaagtctgagtggctgagacacaaacctttaagaagctgtgggcacatagctcagggcagagcatttgcccactatgtacaagtcccggcttcaggtccaaacactacaagaggaaagtacagaacaaactcacttccctgagccgaaggtgaaagacagggtctccagctctgaagcccagggcttcgtgagtagtgggagggatttgtcaggaagcagtgccaaagtcaaattcaatgattagataggaacagagaacgacaagaatggatttggctgctccgtttgggaattcttgtgggatctagaggggaagggacgggatcatcaacccagacagataagcgtctagggggagtgttgttggcaaatagactacagatgctggtgggatagggaggcgccaaggagtgactcctagacttcccacctgtacaggtgggtggcaagaattcagagggaattttaccccttatataacccgttttattgctcaaagcctagcacggataagctatctttctacttcccagagtcgcagtggaatccaagtggccttgtcttttagggacagggagacacattgttgccgtgccacttaacacgctggagtagcatctttgtggcccaggtattttctccaatccttcaaagagcctaggaagcattctttcctgtggaacggtgcacctggccacactgctgagtgttaagttgttttcgttaagcatctgtctttgagtctagaacgaacagaaataaggaaacataggtaaacataacggcagaaaaggtactctggattcctgttttcctgtcttagtagctgagcttgtactgggtacctgtaaacccagctccctggagccagaggcaagagaaaggttgcaaactcgaggccaacctgatccacatcgcagcttccaaaccacctagggctacagagcaagaccctgtctccccactctccaaagagtaaagtggaggtttgtttatgcctttgagctcattaattgaccagactgtctagccagtgaagtctggggaccctttctctctgtccccgagtcttgggaacacaggtgtccagtgcggcttccagcgttcgagtggatgctggggatctgaagacaggtcctcatgtgtgcatagcccacacttctccagctgagccatcttcccagccccttgggaagcatctaaacaaaaaagcagcttatatgctatctgtaatttaagtttttttctttgttgcctcgacagccttgctaagtttttatcaattttttttgtcgatcttttcaaagaaccaactttcagtcttattgatttttctattttctagtttattaatttacactctagtcattgcctttggctctagctataattctttttgttgttgtaaatttttctttacagcatctttaggtagagagtggggtgctttcaggtcttgtgtgtgtttatgtttgcctgttcgtgtgtgtacagggatgcatgcatctggctaagagcactttctacatacccgtggcggtacagtaagcactttacccactgagccatttacccagccctggaactcattttattcttgtccagtgggccattttacatcttacatacatctctcctgtcttttgttgtattttccagtgctggggattgaatcggtcttaaagatacagagtatccaccttagctttagcctatattttcaatctctctgtatctctatgtgtttctgtctctctgtctccctccctcctcctatcagtgtctgaggttatttctggtatttaaaatgccacttagaactgctcatctatttgctttgaattaaaaaaaaaaaaaaaaacgaaaagaccaattagtatacaacataaaaggaagttatcttcaaatctggtcatttcttttcttcaattctgtaacatgaatgctgtcccagagtcagcgactatgggactgcatgaagcttaaaatgcaacatcagccctaatggctctccgtagccacgttcagtcgttcagtttgaaagcttggtccccctcgcccccccaaaaaaaccccaaagagaatagggtggttatgtgttgtccaccagtgctggccgtgcctgatctccaggcacaagcccagagagcagatcgctccagaggcacagtgtttgcaggatgataataactcatcaccagactgagcctgggagtcaaagcaaaggaaagaattttaatcgtctctctcatcttggcaagatggtattttgttttgttttgttttcccctaacctccaatgactgtaaattatgttttgttgttctttgtttaatcttatcctgattataaaagtgctacatgtgctctgagactatttagaaatttcaaaagaaagcggaaattccgggacccagagataacgattctttagaaattttggtatcttattatttctttgaaattttctaggcagttattttattgtatgtgtatgggtgttttgcttgcattatatctatgcaccgtatgcatacctcctgccctcagaggctagaagttgttagatcccctggaactggagttacagatggctgtgagccgccatgtgggtgctgggaacatgttcctttagccgctaacatgtccctccagccttgatgtaattatttattgagacaagggctcactgtgttgcccaggttggtcttgaacttgtgatcctcctgcctgagtccccctgagtgttgtggttactacaggtgtggaccatcatacctgacttgatcttgtattattgtttttggatgtggcttttctctgaatcctgtagtttttctctaggtattccgcctctggtggggtgacagttcactccatgttttcatttgttctagttgtgatgctcgacttttgtcatgtcttgattatcaaggtcaaactatttagtctttggatctgtccacttgtttgccattctttaaaaatattttatctatctgtctgtccattcaaccatcatccatccatccatccagccagccagccatgtatgtgttccatgtgagtatgtctgatacctcctcccccaaacccccatgcacatcaggcttcctgcttctcactctccacagtacttcttttcactaatcccagaacttgcattttgtctagactagctggtcagaaagcccctgatatcaccctgtctctactgctgccagcattggtcctcatgcttatgtagaaagtgctcttagccacagagtcgccaacccagccagtctggatttccttgttggggacacaccgccatgctcctgcctcatgccatcattccccagtcaaggatttcagtttgactgaaaatcttgtttgtttgtttttttgtgacagggtttctctgtgtagccctggctgtcctggaactcactctgtagaccagcctggcctcgaactcaaaaatccacctgcctctgcctcccaagtgctgggattaaaggcatgcaccaccacacccggcctgactgaaattcttcaaacttaatcaccttttttgaccaaagtttataaattctctaagtatatatttcataagctggaaagaaattttactctcccttttaagcattttttaaaaaatgataagataaatccagacgtgtgtgtgtgtgtgtgtgtgtgtgtgtgtgtgtgtgtgtgtgtgtgtgagtgatggtaccctgggccctttgtatgttaggcaagagctttatctcttcaaattatatatccagtcctgtcaccccctccccacctctagttttccaagacagggtttctctgtgtaggtctaaatgccctagaacctactctgtagaccaggctggccttgaactaagagatctgctttcctcttcccagtgctgacattaaagttatttgacatcaccaccttatcttatagtgattgaaaatttaatttaagaaatatcatctgcatacttactttatgcagtatagagggctaggcaaaaatttaaaaaaaatatttttgcagttttccagtcagtaattaggcattgagttatgcccatataaaagagatttcttacataaatcattgataattgcttgcttgttgtttcatgtattctttgacaatttcatatacatggataatgtgttttggccacatcaaaacccattactttttggttttgaagacaagctctcatgccttcaatccacaaccctcctgctctccagtacgggggaagctgccgtgtgccacccgccctcacttaccattgataattttgaagactacttcaggatatagaaagtgccggtaatatattcagttagaaaaagcacattacagagtggtatatattcagtgtaatttccatttcatcttttttttaaaaaccccaaaaccctgaaactagaaagaatatgttcttaaatgtcaatattgcttatttctggatcagcaaaactttttttccatattctaatttttctgtaatgaaaacaaatgaattttatgatcagatggtgtagcagaatggcagtggtattttaaggacagagccctgctttttaggtttctatgcaatgggcactttcatccctatttcagggatctatttcgatctcccggggaaagaaagaccaaagctgggccttaaagggagagcagaatgcgaagccctattgggagccggttctcgtttgctttctgctactgtgaagggtttattaggctagcaggtcatcgtccattatcaaaggaagtcaaggcaggaacctggaggcagaaacttccagggagcactgctcgacttatccaaccctggatcaccttcccagggtctccacagtgggctcagcccttttaaaatcattcagcaaccaggaaaatctccacagacgtggtgatggtcccgtcgtggggaggcactacctctgctgaggctccctctctccagacccgtctaggtttgtataaagtggacaagaagtatgcgggccacggcccatgcagaatggagtcagaaggaaggccaagagagtccagggtgagctgtgagatctgagcagtgtagcgtgttgtgccctctggagaagatggctactggcctgatgctgagtgccatattgtgggcatatctgggtttctataggaaagttgggtaggaaaggtgagttggccaagctgaaggcttgggaggcagaaggcaggggacccatggggaccattctccctttggattgttactctggttctggcctagcactgggctacgttctgagtctgccatctcattcaccccttggttgttggtgtgtctgggtcctgcctgccattgtcttcagagcccagcttcactctatgaccttaccataccttctttgaagccagactaataacctggatctctttccagtagatgctcagctatgtcgggttcacctcactggtccagcctttcagttcatagaaggttccatctttccacctgggcgtggtgccacctcctgtaatcccagctttggggtagactgcgttccaaggctgcctaggcaacactgtaaaagtctgtctctaaacaaaaccaaaacaagaaagaacaaacaaacaaaccaaagcttccaccttttgaatctgtccccaacaatctctatttccccatcttaaaaactacccagaccagaggtgtgggtgccctcactaaagacaggcatcactaaagtcctgtatggctccacatacaggaagtactgtgagcaggtagatacagggccaggtgggaaagcaggaacagggaattatcatcctaattcaggttgtggtggaaaaaacccattcccatgattcccatggtgagcggacatggtgaatgcactcggtgccattgagtgattgacatgggtctgggacctcaatgggtaattatttgctacaaaaatgggtaattttatgccacaaaaaaaatgaggaaccaagttagaatttccagtgccatgtaagtgccaaacaggctgcatacatctatagcccgtgttcctgtgggaagatgggaggctgaggtaggagagtgccgtggagcttgtgagccagctagtctaaaatttcagagtgggtggaaaaccaaagagacttgtcacagacaaggggaaagtgacagctgacacttgagactctcttctgacatccacattgtggcacatgcaacatgaatgcacacaggagtttcacgcactcgtgcactcacatgcacatgaacattgcctaaaaattttaaaaattgttaaacttcaattaaaaataaaaatggaggaccaaggggctggaagatggtggctccgtggccaagtgcttgccatttaagctcatgaacccgagttaggctcctcagaggtcatgtaggtgctaggtggacatggtggcccacttgtaattccagcctcaggaggtggaccgagttggctagtgagactgactagtctatgagctctgggtttgattaaagaccctggctaagctagaagagtaaccgagggtactcttgatatgaatcttgagcctctacatgcagggacacacatacacccatacatatcccttgcaacatatgcatcacacacacacacacacacacacatacacacactcctttgctattgccagagtgtatagaaaggagtctattaccttgacctcattaaccctggcccctccccctttccttccttgcaacgcatcccccacccccccacccccccatttccttttgatagggtcttaggtaatgcagcctggctttgaactcttcatgtatcttgccttcttatctcaagttctagaatggctggtacagaccaccacagtggtttatttgaggctggggattaaaccaagcctttgtgcatggtaaacacagtactagctgagcctcttgctttgtctgtttaacatttatttatttatttatttatttatctatctatctttaaatctgagttccttgtggcctgggctagccttagcttgttagagagccaaaggtggctttgaactcctaatcttcctgcttctgccttgtaaatgctgagatcccaggtgtgccccgccctgccccactctagatcagtatcagcatgcagagggtgaagggtcctgggaaccatctggaaacgtagccatgccatggctttcccagattttctctagggatgggggggtcgatgcagagcctcaatgtgctgtccaaactagccccaaagtctcagcaatcctcttgcctgagcctcccagctgctgggattataggcaagagctgccacacctgactgctgagttcttccatcttctttgtggcatgcttggccagagtgcaggcactcctgagacagcttggctgtgactaacactgacagcattgttctcattgaatacctccgatggctctttttactgtaactggcttcacgtgtcagctggctacaaactgcaagactgggcaccgctctctgatcgtccatgttctcacagaatagtgtgggcttttattttaaagatttacttgtaattattcctgagttctctatgggggagcatactgtgtatgcgcatgtatgagcacaggtgtccacagaatgcacgcctacaaggaggtgttggagccttgctgggattacaggtggcaagcactccttaccgctaagccatctcttcagtctgttgcactttttttaattgagctgattaaaaatctagatttccaacttttctagagaaacaggaaatcaaagtgagttctatcttctttgtggcatgctgggccagagtgcagacactcctgagactgcttggctgcgactaacactgacagcattgttctcattgaatacctctgatggctcttttgactgtaaccagcttttgccctctctggatctgagttcttggtcttcctctctttacaaaaaaaaaattattaggttttatttataacgtttgtgaatttgtatattatggttgttcggaggacagaagatggactgaaagagttggctctcccaccatgtggatcctggagatgaagcccaggtcatcaaggttttgtggcaagtgcctttatccctgagccatctggtcaaccccacccacagcactcctttttctagtccaggttcttcacctcagggcaccattggtgactcctcttctctcttgccgtgtttggttttgggagggggttatttcttgaggactgtctctgctaaaagtggtcaatggagaccaccacataaaggagcttgttccctgcatcagagaagggaatttctcatctgggaaatgttattacctcacaagtatgaaggtctgtgccctgatacccagaacccatgtaaaaagctatgtgcttttacctgcaatctcagcaatggcaagatgggtgacagaggcagctggatccccggagctcactagtcacctagcctggcctgcttacgggttcccagtcaatgagaaacaaaagtggagccatgtgaagatgtagatgatattgtcttccccaaacactgagacactcacatatccatggcatgtgtgcacatgtgagtatactctacatgtgtacatgaacatactctacatgtgagtgtagaagggaagaatcttccccatgtgttcaaatggccaaggacattattttagccattggctaactctctggtaggcaatagaaccgtcttaaccactcaccgctaagggctacaaccaagtaccttctgtgccctccactccaaaggagcctaaaaaataatgttgcctgtggagcaagatttagtcagcctgcagttgagtttctaagtctttggactgtatagtaagaccaagaatagtctgccccagtggttctcagccttccagttgctgtgacgtttaatattgttcctcatgttgtagtgatagcacccacccaatcccaaccataacattatttttgttgctacttcatgactgtaattttgctactgttacgaatcacactttaatatctgaagtcacaatatctgctatgtgacctcttataaaaatgtcttctgaccccaaaggagatgtgacccacaggttgaggaccactggtcgactctctcagagaaaatgctggaggactagaactgttcagcatgagctgaggggagaaacagaatagactgtttgagtaagtcacagtattctaccgtcttggggtatcctgcctaggacagcagtgggtgaaggaaactcatctgggtcctggttctcaggggaggtagggagagagagagagagagagagagagagagagagagagagagagagatctaccatccttcccacaaagcgttcagtccttggactcctgcatcctccccgctcaagcgagtaagatcttgaggattgggtatggttgttgacttggagtcagaggaaaacaagggaacatgggcagagtttgggaagcccaatgatttgtgccctaaactgcttggtgtggaccaaacaggtcctgaatgatggggagaccagagttacctctaatgtcaggagccatggcagggtaacgcaagcaggaaagccccaaggtcaaattccacacatctgaacccacactttgttcccattgtaaagtccccagcttgcttcactgcaccagtccgagtctcctgtctgaaaattcattctaagaatcgcatctgcacatctagctgggcatcctaccttgaacagttaaaaatcagatctgctttactgctaattttagaaggaactgggctgaccttcattccgctgttgctaactggagccccgttacctgggtgactggattcacaatatgtcagtatgcaaatcccatctgcccaggaggagaaggcaagaaaggccttgctcctcctggagctgccaggaggatctggaaacagttctggagtgggctggcgggcgggcggagggtcctggaacagaaggaaatagggaaaggacaggaggtggctagagccttgtcttccctgcctttatcaccttcaggactttgctctggggcagagtgaggatggttgcgtctaagggcttacattctttttgcatttcttcaaaggtgaaatagtcactttactgggccataaaacattttttgagtcattagaatggtcgagttaagacgttgttgcgtttgtaggtgcattcatgggtgcattcgtgagtgcctgtttgtgcacatgtgtggcaccatggcacacaatggcatcagaataacccgaagggatctgttccctctatccaacatgtaggtcctgaggattgaactccggctgtctggcttggctgcaagcccctctgtcctgtcgcacccgtttcaggagctccacttactgaaggctttgcttctgtggcactgctgggaatcacatttctcactggtgggggagccaagctctacggaatagacaggtcaattcatgtgacatctccctctcgtctgctgtcaggagaaagggctttttctcccaggagggtttgtatccagctcttgttggatacagtgtttctggctggtggttcaactcagtcaccttcagatacattcaaccctgaaggcagggacactcccttgttccctttcatgaaattgctgtcacatcagctgtcatccccaggaatccctccctgccacccacacatttttctgagtccaaatgggatggactcattaattttaatttatacttcaaacctcaaggacacccaggagtgagcatgccttatttaatacttgtgctgggtttgtcagggaggggaacttgggtgcagggaggagacctccgacttttggtttctaatgttggacaccctcggtgactttccctgccttctccacagtctctttctctttctccttagctcttttctctctcagctcattaaaaaagttttttttctcctagcactgctaaaaaaccatcagcaacaggcaggtgtggagaaagtcacttcccttcccatgatccttatgcccagacctagaagtggccttccttctggctcataaacatggagacaatgaccaagggatcctggagtttactacttaactagcttggtgaccacagacaagttacctaacccttccaagaaccagtttcttcatgagtcaaacagtgatatagatactactgtagcagagctgctgggaggactcagcgcgtggggtctaaatcctggaactccttgctgggccgagagcagcctgcacaggatggagcaggttttataaagcttccttccctgccttggcaggaagttccactgttaagaaagtgcatttccaggattggcttggcttacaggctatctctccccttccttttcctttttttggggggtctgggggtgtgtgtggctcacgtagcccctccctggcctcaaacttgctgtgtgatggaggagaactctaatcctcctgctggagttacaggaatggaccacctcttgcagtttatggggctgggaatggcaaccagggcttcctgtgtgactggcagtctaccaactgccacacacacccaagcctgtcctgcctcaaggtcagttctcaatgcccttcccccaaggccatgctaggggtggtggggatgagatgggcaggggcatgccgtttcccaaccctgcatactcaaggtctgcacagctttgcgcctgcaatttcatcagtcacattagtcggtacaattcgttttcaaatctgtgtaacataaaaatgccccaagactgcaaagtttcagggggtatttgttcagtgagccatatttgcccaagtataaggcagtgatgtgaagaccggaggctagaaatttagccacttgctgggcattcttgtttgcgtgagtgcctttgtgtgtgcatgtgtgtgtatgagagcgcatgcaagtgtatgtgtacagatgtgacagccaacagtcaacatcgagtgtgttgctctactgcccctcactcacccttgtattttgagacagggcttttcatcaaatgcagaactcaccaactggctaggagctcctagaatcctcttctctgcctcctggctttgagactgccggcacgctgtcctggtttgctttttagggcgtgccgggggtccaagctcaggtctttggcttacacagcaagcattttgctgactgaacccttgccttagctgacattcttgcttttacagataatttaaagctatctacattgctgggcagtggtcttaggtgacccttgtgaaaaggtcatttgacctctgaagtggagggggtttgtctcaatccctaggtgagaccctctgatcatagcagcgtgattcctaacagaagatgtaagtcacaccaaatgcccatcagcaggggatgggcaaacaaaacgtggtgcgcccatattgtggaataataactaaccagtaatgaaaggggaagtactgactctttggctacaatatgattgaagcttaaaagatggcaaccagacgtgaaaggataagtactgtatagttcatttataagaaatattccaaataagcactttcatagaaatggaaagtggttactgtgcctgggatggagggcaatgggaagcaactgttcaagagtctggggtctcactggggtgaggaaaacagagaattaggtatgtgtgccaggggcacacctcagaagtgaactcaagagcagggaattgtgttccttaacaagtatgagcagctgggctggagagaaggcttagaggttaagaacactaactgcccttccaaaggccctgagttcaattcccagcaaccacagggtggctcacaaccatctgtaatggaatctggtgccctcttccagtgtgtctgaagaagactaccgtgtaccgtataaaataaataattctttaaaagccatttgtttattcctttaaaagaaagtgcgggtagcatctataacaacaagtagtccagggattggagtctgttcccaggtgactttctgaagaacataggcttcctaaagtagaagagtgatggcccataaggaaagccaaggatcgggaatgttcttgggggcacaacagtagaggctctgaatctgtccccaacactaccaaaaagagagggaagcaggtggaagaggcagggaagggaggcagggccggggagaggaagagcatagcagagagaaaggtggaggaggagagtaggggggaggggaaagggaagattctaaggaagagataaaggagatttgcatgagaaagtgtggctctgccaccccagctctttgagtctgttaaatgcatgcaattcataaataaattctggtggcccctctaccttctgtgctgtggttctatagtttaccacaacgctggctgggccattgagagcataccgacccacctactgtgctgggccattgagagcataccgacccaccgactgagcttccgaatctgaaatagcagtgccttttccggtcaggcccacctccagcacactgggctcccatggtgataattcccagctgcctccttgagttgaccttccagagactgacttctctgcaattgcccttgggccttttcaacctcacccaccccacggagtttaccagtgtaggactccagagcattgcaggggacctgagtgcaagtctgctggcttacatcaacgcttgggtggatacctcaccatccctgcttcctaggagagggtttggctcccaggcactgcctcttcttcttcttcttcttcttcttcttcttcttcttcttcttcttcttcttcttcttcttcttcttctgcttcttctgcttnnnnnnnnnnnnnnnnnnnncctcctcctcctcctcctcctcctcctccttcttcttcttcttcttcttcttctactttttttttttctttctgtttctcgagacagggtttctctgtatagccctggctgtcctgcaactcactttgtagaccaggctggcctcaaactcagaaatccgcctgcctctgcctcccgagattaaaggtgtgcgccaccacacttggcttcgtatggttctaataacaataagaggctatgtaacaaaactaagactccagagctgatctaaagaattccatggcttcttcttgatggtcatgattcacaaaagtgagacccgataagggagtggagaaactgggcccttctacactgccaagggtaaagaattaaatgagggcccaatggaagcagtttagggtggggtcctcaaaacttgggtgttcttgggtgaacagacagtgctcgaaaggaaacataaacatatatatggtcaataagtacatggggggaatgtcagcttcctcagctgtctgggggatgcagatcgaaactacagggagggagctagagagatggcttagcaaatccagcatcctcttctatctctgaaggcagcgcatgaatgtgtgtgtgcacgcacacacgcacacaattattctgttttcaaggaagaaaaactacattgggattttgagatgcatcacacagaaggactgttcttaaggaagtaacaaatgctgggagggagtagggcaaaggcgctcttgttcactgctggtgagaatggaagtaagtccagctactgtggaaagcagtatggaggctcctgagagaactgaagaaagggctttgatgtgatcgggagggaccactcctgagagcacaccagatgggttctaagtcggcttgccatagaggtccgcgcaccaaggtgcctgttgctgtgctcctctgaatcagcccaattctaggaaccagtctggcgggtccatcaacagacgaatgaataaaagatgtgcaaacacaatggaattttattcagctctgaacaataatgaagtgaggacatttgctggggaacggcagaattgaggatcatcgtgttacatgaaataagcccggcccagaaaggcaaatagcacacgattctctcctaagcagcagctagatttaagagaacgtgatgatggaagagagatacttaacagcgggaaggagacagatgatggatatggaagagtgaatgctaccagagtacattgcacacgtgtgaatgcctcataacgaaacctttgtacaattcatacataggaataattttttaaaagataagtgtaaatggcctgtgggataactctgctagttaaaggcaccttctacccagccctcctgaggtgatggagagacccaactcccataagttgccctctaagcagaggctcatgcatgtgtactctcactgaatacatagaatatcttaagaacttaaacttggagcaggagagatggctcagaggtaaagagcactgactgttcttccaaagatcctgagttcaattcccagcaaccacatgatggctcacaaccatctgtaatgggatctgatgcccacttctggtgatgatgatgaaagtctttgggctcacagtttcacgtggcacagtccatcttgataggaaggcgtggcagcaggagcgggaggcagctgatctccctgcagcatcaccggcccagcatcactggctggaagcacagagttcctcccatcatttctccttttcatggcatctctaactccccagcccatggaatggtgccacccacatttaggatgtggtttctcacctagttaacacagtctagtctttccctcatgggcatgcactgacgtctgtctcctagaccactcttgatcctgtcaggctgataatcagtattaacaaccacaggtctatgaagactcccgtgcctggggaaccaggtccctcctccaaaacagggcgaagaaagccactgaaaccttccaggctcagctctttagattgaacttgtcatcccctctcccctagtcacctgaagtgacttgaaccacagtccacgtgctccaccaagcgattctgtggcctacagatactctcaagatggcggcttgaatctctctttcacattaagaaccaccactgatcgaccacactcacccagtgtttctctttgcattccatttcccttcctgctctcccaaggtttcctagacatggaactgcaagcctacatctgcccctagctgttcttcagctcctattgacttccctggtcacccagagagagggtttcctaagtcctcggcaggggccagttgtttcataagcagcttcttttgttctaaaaagaccctgtttagcctagtgtgagggcctctcccttgggaacacttgatagcaggctgaggtacgaagatgaacactgacaaagcaggcacaagtaaacggcaggtcctggaaaagccccatctcgtcttgggattggctgtgcgcctttcttccatagccaatgcaagcaactcatttgcttgctgaaggtcaagcctgcatcaggcccttcatttacttgagtcagcatccacttcacatttgccgagaaccactggagaagtcccatgatatgtcaggattcgttagctgggttgctagtgttgtcttcaaggcagaatccctcaggaaactcatctttgaccaacacggagactgctgttcatcaccgtgcctccattgtctgtggggtctaacatgtatggagtacttgtgttaagtgatttgttttgggtttggtttgtaagtgatgccgggtcctggaagatgactctgggtaaagtatgtgcttgagttcaggctccccgactcatgtaaagtttggcatggcagtcaggacacgcctatacacactccagtactggggaagcgaaggctgtagactccgaaggctcgggagccaatccatctcccaagaaagcacccgaggaacacactcacccagtcgcaagtgtgcatgtgcaccacacagacacacatagaaaagagtgatacagaattcgcagacttagtaccaagactgccccacaacttgtatacagagaaaccccacattcttctagagcaacttcctgtggtatttaccttctagaaggttcctcctttgctctcttcacggctcttccaggcttccactaatggctggatttccagcatcttatcataaatgcaaacacacccagtgcctcagctgacacgtaaagtgcatgacgtcctttcagtttctgacctgtaagtcaaggaaatccttgcgggcaggaatatcaccccctaatgcgcgtgagccctgcaatgtacagagtgtgcatttttaacagttttacttttaaaattttatatgtatgggtgtttcatgtgcatgtgtgtctgtgcacctcctgtgtacctggtgcccttggaggacagaagagggcatcagatcccctggaactggagttataagccaccatgtgggtattaggaattaaacctgggtcctctggaaaagcagctgctcttaaccgctaagctgtctctccagcctctttattttaaatattgctttgttgtctgtcttttaaaaatacaccaaaactcccttgctgggtgggataggttttccaataactgcctttcagggacaatagcaggcttgtaacagcaaatgcaaactcagaaatctctccccttttctgccctccaggttatagaccaggttaaacatctctgtgtagggttgtttatgaatttttgtcacaaaagttttttttttttgttatgttttgtttcttaaagttaaatgtcagtaacccagctcctttaaaaaaaaaaaaaacttcccaccacctcttttccctcctcacgcagtgacacaggccctacgtaaacaaggcacctgtgaggactgcttataaaagtgcagaggaagataaattgatggcgagctgatagatgaaacctgagccaagggttggattttccttatgggatcagatattgttttttttttgtggtttattgacctggcagagcaatatctgaaggaatacccaaggatgtttgtcacttgcctcacccctgtcacgcccccgctccgcccccgtcccactcccgccctgtcgccacccccttttctaaactttccggtctgcatggaaaaatctacacttagaatcgcagagtctggaagacaaaggggttagtgaatcatttcctcaggctgggcagaacacaccaggttcaaagctttcccctaaggagtgagaaatgggactgctcttcaggtaaagaatgtcttgggggaagcgggcattggtggtgcacgcctttaatcccagcactcgggaggcagaggcaggcggatttctgagttcgaggccagcctggtctacaaagtgagttccaggacaggcagggctatacagagaaaccctgtctcgaaaaacaaaaaaataaaaataaattaaaaagaatgtcttggggagaaacagctaaagagggggctgctgaatgggactgaagccagtaaggaccgggttcccgcgcccggtgttaaggttggagtgaccagaatgcatctgggcaaaattcatcaccttcctttctgccagggtcactaccacaacttggcacagtcagctccatgtcactagagagcatccgcagtgtgactcctctagaaagtgcaaggtctcaaggttcgagacccagccaggcagactctgtgggcagccattgtctgtatctcctgtcctttgatttcaacactttaacataagatctctaaccaaagatacgaaaatagtcaggtgcaaaggtccgtgtctttttgtgtcttttgtcatatgtggtgtaggtggtgcaggctggcctgaaattcactatgtagccaagggatgaacctgaacctgctagtcctcctgcctctaccctccctgtactggagttaaaatgtgcaccaccacatccaggtgtatttggcgctgggaatcaaaccaggtcttcatgaaagctgggcaagcactctgtctactgagctatagccccagactgaacaactcttctcttctcttctcttctcttctcttctcctctcctctcctctcctctcctctcctctcctctcctctcctctcctctcctnnnnnnnnnnnnnnnnnnnnnnnnnnnnnnnnnnnnnnnnnnnnnnnnnnnnnnnnnnnnnnnnnnnnnnnnnnnnnnnnnnnnnnnnnnnnnnnnnnnnnnnnnnnnnnnnnnnnnnnnnnnnnnnnnnnnnnnnnnnnnnnnnnnnnnnnnnnnnnnnnnnnnnnnnnnnnnnnnnnnnnnnnnnnnnnnnnnnnnnnnnnnnnnnnnnnnnnnnnnnnnnnnnnnnnnnnnnnnnnnnnnnnnnnnnnnnnnnnnnnnnnnnnnnnnnnnnnnnnnnnnnnnnnnnnnnnnnnnnnnnnnnnnnnnnnnnnnnnnnnnnnnnnnnnnnnnnnnnnnnnnnnnnnnnnnnnnnnnnnactccagctctggtgtgtgtgtgtgtgtgtgtgtgtgtgtgtgtgtgcgcgcgcgcgtgtgcgtgtgcgtgtgtgtgtgtgtgtgtgtgtgtgtgtgtgtgtgtgtgtgtgtgtgtgatgccttcttctggtctttatggctactcactcacacacatgcttgcatgcacacacttgtgcacacaccatacatacgaagtaaaagtaaataaataatcttttaaatacaatgcaaaattacgtcatgactggatgacagatacactgaccacagaagacatgttcataggccttttcaagcaagtgataataattttataaagggaacatacccaggacgtgactagggagatggctcagtgagagcggtttctgccaagccagttgacctgagctggattccccaggacctacacagtagaacaaacactacatagagagaaccaatatctacaagttgtcctctggtccccacacatctaccatggcacacacataagcctcctactccctcacaagcacaaaaataagtaaatgatatgattttaaaacataaataaaaataaataaacacaacccgaattgtaacccattaactgtctcattgttcagtctcattacgcctgtctgaattatcgggtgacagccaccccatatgtctctcagacacttttcctatagtcatctcaaactcaagctcaccttcctcggggtctgatgggtgttgtattttgtttggtttgatttctggcccgtggctggtgcctcattttcccgtgtttcctggacctctgatgtaatggcggcagggatgaagtcctggtcccgaggggtaccaggtagaatgtgctagagctgtagcagttcgtatccaggctggtgatttattgagcatttgaatttgcaaaattttccccctgtttgattcttactgtaccccgtgtgtgcgttgattcttactcactgtaccgtgtgggggtggatgtgggggtgggggtggggttggttcccgttttgacgactgcgaaataggatgaagatgtgaagctcctgtcggggttaagaggctaagtcaaaggcagaataaggacactcactccatgttttcatcttgacaaccaggcgcgccttctgcagggaaacaattatcacctcctctggtggcccaggtaatagcaggtcctgagcgagggaggtcttctccaacagcatccttgatgacctgcggtccatcctcaggcttggggacactcatattctcagacgggcccgatgcccgaccggcacccctagctcccaggttggatatggttaagatgggctcactttaaatcccagtgggtataagttagagtctaccactcccaaccttcaagctccttttttccacgttggctgtgaggctttacaatcctatgtgcctttgacagtgacggcaatttcaggtcacattctaagttctccaagcagggatcccgttcatgcattttctagtttaaaaaaaaaagactcacactggcatggtatctaataccaatattctcagcacatgggaggtggtgggtcaggagtttaaagttgtcttaggctatttgactaactacctagttcattctaggcctggatggaatacatgagatcctgtctacgtttatgacgttcctggtctacatagtgagttccaggccagtcagagctacatagcaagactctgtctccgacaagaataataacaacatgcacacagagaaaacaaaataagaaagaaaacagaagaaaaaaatagtggttctaatgcttagggcgcacgcgcgcgcacacacacacacacacacacacacacatacacacacacacacacacacacacacacacacatatatatatatatgtatgtatgaagtagatctcatactaggtagatagctactaggtggagagctaaggcaagactaaactgaaccaggaaaataaaataaaacagggtcactcaactttttgtgtaagaggacagtaagcaaatactcccaagtttggagaccatacctctaagtcttttaaaaacactccacataccacactataacattaaaaagctcacgggatgggtgaacatgtttgtgtttcaataaaactttatttgaagggagacaccagcacataatttcccagtgatacagcagggctgtgctgcgggattatagaagacagccatagcctctggcttttgagacttggacgtgaacatccacactctttgtctccttcctcgtgtgtaacgtcagtgttgagatcgcttagcacgaggcccgcccgcaatgggactgaatcctgggaggttagcagcactgaatcaggagcactcctggtgggttccatgaagccattgctctaccatgctctgtggttcatgtactgaggatggagaaagaggcaaggaaggctcgtaaagtgcattaagggttgtgtgaacagtatgagaacatcctgagtgcacgattatgtcaccatgtgctcttctattcacacagctgtatatgtggtggagggggggagggggagagattgtactcagtcagatgggcatggagattcttctggaaggattgtccagacagcctagcagggagagcagcagatcttgttcaagctagtcctggttgcaccgggaagatgttagtaaagcgctgacttgacaggactgagtttgagatgtagtcaccctgggcatggaggacacagcaggactcagacacacttcaaggacagaaaactgcatgatttcatgttcaattgggcggacagcaacttctgcttatgttatgtggtgcccattcattttcacagtaaaggctaaagtaagtttatattctaactgatcctctcattgggggatgaggccgactggagttagactagtggagaaagggaaaggggccaggggatacaggtattggttgatggcatccccttggtcagtgaagggcttggaagatggtacttgcttcgttctgaaactcaggcgggagcttggaatttcattgacctagaacttgggatcaaatgtgtctttagacaagggtacaagtgagaatacttggtttgtttgtttgtttgcttgcttgttttttgggttgtttgtttgtttgtttgtttgagacagtgtttctctgtgtagttcattccgtagaccaggcttgtctctagctcagacatttgcctgcctctgcctcctaagtgctgggattaaaggtgtgagttaccaaccactacctgggttatcgttggtatgccataaatgattcctgaccacacttagactttttagtttggagattctgtttcaattttatttctttagaaaatcttttgtgttaatatgctagtgtatggggtgtgtatgtctttgcctgtttgtgtgctgggttgtccatttgaaagtcaggatagaactcagagcgttatcctcatccttcatcctatttcagacacgttttcagactgtttgttcctttagagattctgggaattctttaatccctgcttgtcagcttccccccaggagtgctggggtgacagcttcctggggttatgacatcagggtctcatggttgggtggcaagccctttaccccagcttctcccacccaaccctcttttaaaggcatgctgtcactttgtagccctaggtgactcaaactgctatcccctcctctcccattgtcttagtccggaattctgttgatacaatgaagcatcgggaccaaaagcgagtgggagaggaaagtgattgtctggctcacagttccctatctctgttcatcatccaaggaagtgagagcaggaattcaaagagagcaggaacctggaggcaagagctgaacagaggccatggagggatgctgcttataggcttgctcatcatgcttgcttagtctaccttcttagagaactcaggaccaccagtccaaggatggtaccacccccaataggctgggccctcctgattaatcactaattaagaaaatgctctacagacttgcctatagcccaatattatggaggtatagtttttttgttttttttaagattgtatttatttgttttaatgtatatgaatgctctgtttccatgcacaccagaaaagagaaacagactccattatggatggttgtgagccaccatgtgctgggaattgaactcagaacctctgcaaaaagccagtgctcttaacagctgagccctctctctagccttggaggcaatttcttaactgaggttccctcctcctctcttgtgactttgtgtcaagctgataaaactatcaggcatgctcaacttcccttgtacttggattacagccaggaactaccaggcctggacctacacccatccccttttaattaaggcttggggttgagcccttaaatagcccccaaggcactcagtcctatagttaggacagcgggaactagtaacatcttggtttctctaggcacattctacagcttaattatctagggtcactgtcaattagattgctcactcagaacctcaactaattggtggtcagtaaagctaagctgagaccggttcttcgaccctgataccatcagaaccctctgctctagtgccttcatccaacattcaaattgggctggaaatagtgatctgggcatgggtgtggaagaagaagcaagtctcataaggaggaaatctgatagcctgatactgtttggttcccaaaagtccccctgagtactctcactatattaagaaggattgtccttagtgtgccccctataactcaacttcccagcccctgcctctacaatcaaaatgtcaaaggtctgagatgaacccagatgtgccgcaggttagtaggggacatcagatcccttggggctggagttatatatgtggttgtcaaccaccagttgtgtgtgctgggaactgaacttgtgtcctatggaaaggcagaaagtgcacttaactgctaagctacctctcagcctctgcgtgtggcatttttaggtgtttcaagaactacctgtccctccctacaactgagatactgttagctactcatgtctgaggggcaaactcgggacttgataataaaacaataacagaggacttctggatggtcctctgagtctgatggccatgccagcagacggggtctggttttcttgggaggaaaggaaggaacagacagccttggtccatctctgagtctgggcttgtgtgtcctggcaccttctgcatgttccggttattttccaaccccgagaccgatgccgtcatagtgagctaaggctggtgtctgccctgggctggcccatggaggagccactggaatgatcaatgaggccgggcagctgggtcccgtcggccacggtgaatcagccgcccctgccttgcccagatccattgcctctgagcaggaagcacttgctccgagcccagccaggctgactcgtgtctggctaatggcttttctgtgtcacacatcgaccttggcaccctactcgttttttctgtgtgagtggtttagagctcttagagacagtgtgctggtagatttagctctcctctaagctttccagcgacagaccttggcgggactttgaataggggaggcttcagacacagcactttttttaatgcttgttttacatacatgacatgccagtaacttttcaaaaatgttttttataaagtatatatgtgttagtatatacatgtgtattaaaagggtatattatacatgttatataaaatatgtattatatatgtgtgtattatatgtaacatggcattttcatgcatatatgcagtgcatgttgatcatatttacctcccatgaccctctcagcctctcacctactcctgctaatctcttctcttccaaccagccccttcgactttcatgtccgtgcccctccccctcccctgccccacccccttactgagtttcatttgggttcctcaaaggagcagaagttaggaggtatttactcacagaaacatgggccactgacaaagtggcaacactaaagaaaatgtctcttcctttccctagcaactattaactacttgcaattccttaaagagaggggaccaaccctgtccccccctcccctgcccccacagctacagatcaagccagggccttggctaagccaggctcaagctcaagtttcacacccccaagtaatcgcttcagagcaaactttcttaatgtgcatcaacaaccatctacccagacagagcctttcattactttgtttctgatgtaccaatggtgtgtgtgtgtgtgtgtgtgtgtgtgtgtgtgtgtgtgtgttttgaggtcagactgaggataacattagctgtctcaatctctatatatcatctctttattttaaatttattattattattattattattagtgccctggcatgcatacgatgtatgtgtgttggcacctgtgccacagcgtgcatgtggtggtaacaggacaactttgttgagtcaattccccctccactcatgcattggtggcttgtgtagcaggtacctccacctgctgagccagactctcactgaccctgtagattcacataggctggtggccagcctgctccagctatcctcctgtctccacctccgtcacactgctgggagtctagatgccctccaccctcagccttctcagggtggccggggtctacgcttgggaccttatgcttgtgtggtaagcactgcactgagagccagtcctcagcccctgtgctgtgtaattaggtctgccagacagagcagaactagatagttaaaccacagctattcattttcatttaagcctggagatcagaaccaaaatcaaagtgtgagcaaagccttcttgttcggaaggtttgatatgggagtatctatcccgggccccaatctaatggcctattgaggccacactcactcttcatatgacccttcttcatccctgtttgtctctgctctactttctcttttgtctaagaacaccagtcatgctggatcaatgcccaccctgatggcatctttgaaatatatgggaggggagacacttcaaccataacacattaagtgggtggcttcagtatcaatatttcattcctttttgtggctgagtaatattccactgtctgtggccattaggtttttaaacatcgtgtccaagcagttgctgtgtacccgctgagcagcagagtgcgttcctctgcttgtgtctagtggaccacctatcactccggtatagcttccccatccttgtgggagggctaacctttggaaacagaagtgaaagcagtagtgggcagaggggaagccaggtcaagcctcatatcctctggttcagttttaaaaatggatttctcttccagcttcctctctcctcttcctgagagtatcctgtaccttctctcctcacaagttcacaaacacacattcaaagcattttaaacatgggctcgttctggacagggccttggccagataggaagcctaacccttggagaagagcctgatccgttgtcatggtaacggggcctctcccttgagctggctgcagagcagagcctgttcagagcttcttcacattgccttccatgcacctgcctcagcatgaaaagagggaccctgggacaagagacctctcagctttgggacccaccacgatgctgacttgaatatttcagctgcctctaaagttagaataaattggactcttgcacatagacaggggctctgcatccctgctagccaagggcccttgtgggaaaaactggacctcctcattagcttatagaagagtcgggctttggtagtaatgactgtgtgctggctctcactgactgtgcaaagagggccacagcagagtccagatctgagcagatatgtcccctacccagtggttataaccctctccccccacccccatcctcaccccagaatatgccacctcaggagtccattggggaaagaagcacccactggccttgggttgggctttttgtttgtttgtttgaaacattattgttgctttttttttttaatatactaagttttatcgtatgtttcatacaagtaccatagtacataggtatgggtcaaagaaacttgcagggtcagttttcttttctcaccatgtgggttttggggatcacactcgtgtcatcaggctgggtgacaaatgctcagacttggagttttgggagaggtaggaaggaaggaaagttgagccacctagggtgaaggctgtgcagaaaatgtctcagtccccggttgctccgggatacccttgtagggttgatagactccagaaggccccacactgttagtaggcttgggtgacagtgacccagagataccaaggatattcttcagtgtggcacaggattctgaaacttgggattttagctgtgggatgtggatgtttggggcttttcaagtatctagaggccttcacgtgagcggctcgtgtttgtatctgagtggctggggcaggattgtccagagtataggcagtataggtcagagagagagagagacagagacagagaaacagagagaggcagacaggcagggaccgtctcaaaaaacaatggttcttgtcagcatgaatgaaggcctaggttcagtcccagcatggagtaaaacagacttgttggtactcacctggcatcctggtacctgggggttcttggaggcagaaggagccatttaatgccatgcttgacttcatgatgaatttgaggccagcttgagctttgtaagacctgtctcaaaaacaaaacaagacaaaggggaggtgggaaaaaaaaacccaacaacttttctcacgctcctgtctagccacctgtgagacctgctattctaggcgggacaagatgcaagtgacagttaatccttttgcccaacaatgctgccaattaacttcagagccaggacagaaataacacaccctaggctgcccttgaccaagccaaataggacactaactccctttaaccctatatgtccagaatggaagtcaaggcagactctagttcttagcttgtgcacggtccttaaagaccgctagaactccagggagctcttggtatggccgctcgctcctactgttctcaggaatgtttctacattctgctcacagccggccctctgccaggctctaaggacagtcaccttagaccccagtgactgctgacttttctcagcagaaggcaccgatgtgatttgttgctgtgtgccctgtcattggaggacaacgtgggggattcgtcagcagcaagccggggctgacctctctgtctccattcctctgtttgttctgcagtacaaaatcggacagctgtatatgatcagcaaacacagccatgagcagagtgaccggggagaaggggtagaggtcgtgcagaacgagccctttgaggaccctcaccatggcaacgggcagttcactgagaagcgagtgtatctcaacaggtaagccattgcagctgcggcgcccctcccacctgacgccacagtaaggtcactagaaagccattatgccaccctgacagccagccatgttattgcttcaaaaccaggatcatcaagaaaaaaatgaagcttatctttgatggcataagtgaaaatctatgcctaggacagtgttaactggggtgtaggacatggatgtgccttgaaatcatagggacagcctggaccctactgcctttgtggctatgggtctttattaggttttctacattctgtcagataactaaccaggagtccaccgagaaaactaacaaagtgaccagagcaatttgtggtggctaaggtggcttttatttctccaagggaccctacccctcctgcagtcagtctctttttggggcagattatgaaccagcgctaaccaaggctgtgttctctgctttgcaaagtgtattttttcttgtcttctgtttgtttcctaccagtgccacagttggttttggggacttgtctgagtttcttcccgcttcaccccatccagccttggcttttctgttcagtgcttttcctggttagaatgtttgtagtgaggggtctgtgagactgctctgtcaggagggcccatgcaatgtgagtacagagccctgagctcggatccccagcacctgtgtaaagagcatagcagggcctgtttgtgatttcagtactagcgaggcaaggactggattattccaggaacttactggccagccagtctagccagatcagagagctccaggttcaagaccctttgttttttaaaaaaaaaaaagtacacatacatacatacatatatggatagtggttgaggaagacacacaatgttgacctcttgcctccttgtaaaaacacaaacaaaaacaccacaaagaaaatatgagccgggcagtggtggcgcacgcctttaatcccagattccaggacagccagtgctatacagagaaaccctgtcttgaaaaaccaaaaataaataaataaataaataaaccaaagaaaaaagaaaatatgagaaacattttattgaagttaactgcccagcaaacaagacttgtattagcctttccataagtacatttacacacacacacacacacacacacacacacctgctactgctgtgtctatctactggctcatttgtgactattgagaagcttttccaacattagctggacaattccccgacttactcgctggccactgtgaagtgtccattgtccatcatccatcgtccgtcgtccattctcctctccccaccagtgacttggatgcggtcatccatttctgagtggggccgtgcttagaaacttcacgcttcaaaaggctaaactagaccattctgtcacaagaagagacttcgagtctcatcagctgagtggagggaaggcttccaatccagtatcttggcagggaaggccctggactgatcaaccgaatctgctttcgtctgcctggggatacagtaccagggaattcttgagtcatggtgatatgcaaatgagatggagcccattcatctgttggacgctctgggtactcatgatttagaagcagtccagatcccagccaaatgttcatctgcaggagttactcgaccctgggtatggccagagacaaatttctatgtattcttctcgtctagtcttctcagcatggaaggtgtcaaacacacaaggatcacctctgaggagaagtgaagggcattcgggaacttttcggagactatggaaaattccatttctcagctccagttgttctcgcttatattattgccgggggactgtcccccgcgcatacccaaatgaagaagaaatgttagaagctttataactttccctcaagcagaagacgtgtccagctgtctctgtcatgtctgttttctctatcaaaatatacgatatttattttaaaggagtcataaacattagtgagagggaagcgggttataaatagaaaacgtgcacttccagtaatagcaactggagagattagcgccgccctctcccgcgcttcctatgacaaacacaggatggagcgtaacaatacaatgctgagcttaaaacaaagaaagggaaatccttagttccctgagtttagaagggaatctgaactcacagaccatggagggctgtggaagcctgggccaaccataccagagcaggagatgtgatctcaggcccacaaagatgggggctgcagctgagagtcaggcatgtgcactggtttcggaaggctgagaggctcaaactgaagagatgaccccagggttaaacgtgcatgcagctgggctggagagatggctcagcagttaagagcactgactgctcttccagaggtcctgtgtgttcaatgcccagcaaccacgtggtggctcacaaccatctgtaatgggatcccacgctctcttctggtgtgtctgaagtcggcaacactgtatcctcttacagaggatcatagtttggttcccggcacccatgtcagatggctcacaatcattccgggtccaatagattgatgctttcctggataaccacacttgctggattaaaggcataaaactaaagtattttaaaaagaaagaactactaatggagatacttccacagagttaaagctgaagaaaaaggagaagggtatgtagaagagcttggcaaacacccggaggctgagcacagcaggtttaaagacaccggcagcaatgcctagctgtcccatgtttgtagtgtcaaaacaataacaatgacagaagataagagtcatgttaatgtaggaaaatgctccaaggtgctaatatagtttagggattgaagagagatgtcgactgttttcatttgttgtttctaacaaatgaaaaataaagcttctaacagggtcttgctatataggtcaggccgactttgaactcgcagagatttgcctgtctctgcctcccacgtgctgggactagagacgtacactgccccaaaaggtgacagtagtctccagagcaacaggacataaagagtgacttctcagggagcatgtgaccagttcagaggggcaggaatcatggaagtccaattttgttggcaaagtaagctgacgcgtccactcacttccctgcatgacctagttgtgcccgtaaaatgagactgatattcaaggtctttcttgtctgttcaaaagggccaccatctgcttttgagaaagggagtgggttcccgaatcatgttttcctgaattgattaatgccaaggtcatacttatatgagcgaagaccagttgtataaattatctcctgtcagtgttttatttatggctgtataatagagggacctcccgggacagaaacaaaaaaggagaaagggggaagagaaacggatgactggagggagatgagtgccgcccgctctgtgagagttgataatggaattgaacaagatcagtggtgaacagcaaaagtataagaaccttagtgatcggccacgcacctacctagcatgtgccctgggttctgcctccagaattacaaataaaaatatcacacacattaattaactaaggacactttttaaatcctatataaaacataagtgtgtccaatcccccagaaaataataataaaccatcatccaaatgtggtccctaaatccattatattatcattaaataaatcctctggtgtacttctctgcactaaagccgagaccccagcacttggtggtgaggagggtaggagggacaagccatcttcccagccccaacagagcagagctatcctgagaccctggagaggaacttaccagctactcagtgtgagaggctgcacagattagacttccagtcagcaatgtaaccaaacctctagttcactgcatgcatacatacaaaaataaattatagatcaataaaactcctaaatgttgaaaatggtatcaagtgcagataaacattctttattattagcggattaggataaagctaataagacataaagacaaggattggtgatatgatagcattaaaattgagagcacctacatagcagagaagaattacaaactaaaaataaacctttatataatagaagacacctaaatttaaaagtctatctctaactagaagaatatatctgtaatgtttgtagagcgagaattctggtatttaaattaataggtctttctcatctttttaaaaaagacttatttgagtgtgtgttcctgtgtgtgtgtgtgtctgtgtctatgtgtgtgtccccgtgtttgtccctgtgggtatgtgcacatgagtgcagtgcccatggagaccacaagagggcatcagtttcagattctcaggtactggagttaaaggtggttgtgagctgtcttatgtaggtcctgggaagtgaacttggctcctctgcaaaagcactctgtattcttgaccaagttttgttttgttttgttttgttttccattttttattaggtatttagctcatttcgttttgtttttaattaaaagaaaaacaacatagaatccatggtttgaaagttgagaaaggggttggaaattggactcaaagaaaaggaagtatgaatagtacatacatgaaaaacactggcttcagaaggaggctaggaaacagattcaagcaagggcatctctttccacacacatcagagtgacaagaattacagtctggtgagtcttgggattaacaaggatgtgagaacacaacccagcttggaaaactggagggagctgtacagagctatcacctctttacaggaccgttggcagcgatggggaaagaggaaagtgtattcccatctccgtctatctcacagcagaaccctctcggaatcaccgtgctgtgcacaagagacaggcgtcacgccatccatcccacgccggctgcaatggaaaataaactaaaactatccagagatctccgatggaaatacgctgtggtgtcgttgcctggtggaaaattccactgtgcgttagctttaatgaaacagatttactctgacaaatttcataaagtgcaataggcaagctatagaaaaatgagcagccaaaaaaaaaaaaaagaaagaaaagtctggctaaatagctagatggtattcttaccattcttttgagaaatctatagctaggaaggattatgagtctaaaattctcattgagaagcttcaattaggaaaacttcagtcattttgcatgaaagatcatcttctaagatgaaattaaagagggacaagtcttatctttggatgcccaaatactgcttatatgagaacaggataaaggaagggctagagaggtattagccatgccagcctcatgacccaagttcagtccccataacgagcttttaaacaaataacaacaaaacaggcaggcgtagcagcaggcatccataaccccagaacacctacaatgttgtggaaggcaaagaaggagcgatcacttggaagcttgcaggccaggagcttgtaatacatcagcagaaatgagagagatccttcttaatacagtggttcacaagaactgactcccacgcacaagttaaccctgccgtcctgacagtagacagccctacacaacacacacacacacacacaatcattaaacaaccaaaaaataaatgggatgaagcattgttgctttttaatagtatatttgaaaataaaccagggattgggcggggagggtgctggagtgatgtctgggctgttaagagctctggctgttcttccagaggacctggcttcaattcctaggacccatatggcaactccaatctgcctgtgactccagttcagtggatccaacgccctcacacagacacatatgcaggcaaaacacccatgcatagaaaataagtttttaaaaactcagtgatttgggctgatgtttcaataggaagcaattatgcagtatatacacataaaatagattgtgtctatgtgtgcatctattagacataggagtgtagacattacaattgggcgtatccactaaagtaaagaataacgtgtattcgtccacctccgttctttctgtctgttcatcagtggtacagttgagagcctttgaatcagttttgtaaacagctggacgatcccaccagatggtgcattctgttggacaacccaggacatactttattatgccctccttttatatactcacaatatgtcttagacataatcttgactttccctctgcacacgtgagtaacccaagagacagtgtctaatcagtttcctttccagaagtgagttgttttagcttcctttggagggtgaggggggcattctgcaactgtatttgacattcagctggttagttctcatctacaatgatcatctgtaaattttttaatgtggtcacaggcacgcaagttaccgatgtgtggaacttatatggtgaattctcatcctcattacattttctcaataaacgtacttgtatgcaatagagaacatccctcattccctgggcccatatgtctttattgagcctggtgtcaatgcgcacatcttgcatcctccgaatgtctttgagtgcccgaggatcatgcttcttgaagcccgctccatggatgcttttgtgaatgttgatggtgttgtctcgggtcactacatcgttgatggcagaatggcccttcttcttctcaacacccttttttgtaggccattctgccaggtctaagttggaaaggaccttcgcatccttttagacctaagacttttactcactcggaagagatacacccatactgggctagagagatggctcagccattaaagagtaggctcacaaccaaaaatagaagagataagcccttatctttttgtaagtgtgtatgtatgtatgtatgtatgtatgtatgtatgtttgtatgtattatgtatgctaaagtcattattttaggcccatatcttagcaacaggaagatatgacttcacaaaagggaaaggaaaaattgatatgtggacagcttttcatagaggcctactcctctaatcccagtgctcaggaggctgaagcaggaaaattgaaagtccaaccaggctaattagaacctgtctcaaaagaaattcatatatcgggggctggtgagatggctcagtgggtaagagcacccgactgctcatccgaaggtccagagttcaaatcccagcaaccacatggtggctcacaaccatccgtaatgagatctgactccctcttctggagtgtgtgaagacagctacagtgtatttacataaaataataaaataaacctttaaaaaaaaaagaaagaaattcatatatcatacaagcaggagttagtaagtaagatggattcccataatcacaaaagaaaatcaaatccattgctttgtggcaacgcgtggccttgagctactccatgttgacccgtggtctgcatgcaaaagtcatatgattgtcatgtgtacatgtaacctcagacttctttggttttgtttttaaagaattatttatttatttttatgtatatgagtacactgtagctgtcttcagacacaccagaagagggcatcagatcccattacagatggctgtgagccaccatcgtagtcgctgggaattgaacctaggacctctggaagagcattcagtgctcttaaccgctgagacatctctccagcccctcagacttcttggtaatcataagtcgcctacctgtgtgttgaaatcttacacatgcaatcaagtatacagctttgtggggagtcctttaggggtcaaggcatggttcttgttttctgatcaagggagggcccatggctgattgggttgaacatttgtgaatctgtctgatttttttatgggtgtcttgaggaattttgtcttgaaggacagactgcctgtagctatggagtcctcggtacccatgtcataggttctatttgtacatggactgtcctgtggacctgagttaacaaacgggcagagtgagtagatgcttctttgtatctatctgcatgggtttggaaacattgcccagtgtatccatgggcatgcctggatatattcaaagcccgtgtaaccagggcctactcttcagctaatgtagaaagaagaaaattgctcaaaggggagatagattgagccataattattattaccaagcaaatctcagacactcatctctcagggagcagtgcactttggctgatgtgtaagggatctatggggataaatggaagactggccaaaaaagcaatctgaggttctatcagtgaggctgccagcaaaagaaagtctgttgtaagcagaaaggacactttactggaaggatgttggggacccacagaattttctggagtcaaatgaatgggcaggaataaaggcagctccagaatgggccaagaacccgggatgacagtggcctttaagcagaacccaaaggtatcttctgtgacctgcccccacctctgatgcctccagccttcactaccataattgctgtggataactcccaacctctccatccttctagcccttgttccaaacccaaactctgtgatgtacagactgcagattagttggctgaacacagaatcatttcgtaatgacatgatagtggaaggggccgtggatgggtagaaagatgtctgaaaggagggtagaaaaaacaggccacagggaaggaagaaaatatagtgtgtgaatctctatataagagagagagagtgtatgtgtgtgtgtgtgttgtgaggggggattgattgattgattgattgattggagagggtgatgctggggtgaacttgaacaaggagcaatggtctgtgtgtgtgtgtgtgtgtgtgtgtgtgtgtgtgtgtgtatgaaaatctcacgatgaaacttgtatttttgtacactaactacacacagggctatgctaaccatgttcagctttcaacatgggctcatgggatttgaactcaggtccacaggattgcacagcaaacacatttacccactgagccatcaccctagactcttttggttttggtgtgcaggtctcttataaccacactgtcatctctttacacgctctgaccatttgtctatcttctttcgaagagtgtctgtctagttgggtaccatttatcttagaagtcccttctcactttccagaggttacaggattattctgccctccagcccttttcataagtcaagggccctgttggatgtgacttacattttggggcacctgatggatttggtgggttaggtgtgttatgctgaataagtccatcacaccagcactgtcacagtacacttgctggttgccgttgggccttaggtcccgttcctttaaccaagtttaaccaagtaaacatttcgtggcccaccttcataatccctgttttcaactggcatcacaatattagtcagattctggggtagtgattataaataaaactctcacctggtaacatggaaggtgaatatggtgcctaatggtgactgtcaccttcggggaaccgaaggtcacctgagagataagcctctggacacatctgtgggagattgaatcgggttaacccaggaggttaattgaagttgagatgatcaggcctcagtgaggttatgttagcaccgtaccatgatctgaggtaccaagcctacgtgaggaagagagcctgactgagcacagcatttgccacgagcttcatgccagctgcgaaggagaggtcaacgcttctagaagtcctgaatccttcctctccgagggtgcagctcagcagctggtcctgttacttagcaactcttgctgccttggcttgagcctctcttccccatttccccttccggtgttctaacctcttccagatctgctgagcaaactcatgccacttcccagatcgtcctcagagtcatccccgtgtccagccaagcgtgtttggctttgtgagagcctgctgtccaggcaacaggtgaccgagaaagtgtcagactctctgacctaattgcctatctccatggattctcagagaagcttcgtggtcattattgacttctagatatccagggatgagcctcattcactagaaaatatcttgcgggactgaggaaatggatcaatgggtaacattgagtttggcttccaacacctatattaaaagccaaatatggctgtgtagcccactaactctaacggtgctggagagtgaaacagcactatggcaactcactggccgcagacaggctccaagttcagtgagagaccctgtctcaaggaataaggtagagagtgatagatggggatccccagatctttctccggctcccccacatgtcccaccctcagacacacacatgtatgtataccaggctcacaagtactaagttgtggtgtccgatgatgtagtcattggtaaagttactgtttcatttccagttagtgctgcaaacacacacatatacttatacacatgcacatacatatatacacatacatgcacacacatatggcaactaataccattctagatgtcagggctgcaacaaagttctagatgggaaggacagagagtgtgctgtaattacaatagatcagaatattattttagattctgtgttctatatacaaagtgtaaataacacatcacgcaatcaatacagggagtgtcttcatggctgcgtcatacatatatatatttaagaaagctatagaaaaatactatggtgtgtgagagacttcctcctaacctgccttttggcacctgttatttccttccgtccccatctcattaactggagaacatgtcaaaagtactgctgctgcccaccctgtcacctccatccctgccaactgctccagtgacatcctagtgggcgtggggccagtggatttgtctcggccctgaagatactgctgatgtgagcagttggctccttaaagcttccagcctgctgatgacctcatgccgttccagcagaggcttccaaaagcctggaccaggctagccccttcctttccctacatctaatgcaaagtctcattaagacgggaggcaatgtttatgttccgattcaagggacttggattctgcatgtggcaaccccacctcccacaggggagggcactctcatctgcaaactccgcctcttctgtgttgccaagaagccaccacagtaggagcacaaacagggactggggagagagcacgtggggcacagcacttgctgcaggtgtgtggacctgtgttcagaacacctgactgcagatctgtaactttagccttgttatggaaagatgagaggtagagacagacagatggacacacacacacacacacacacacagaggagcgcgtgcatgaacaaacatggggagagtgcttgaagtctgtgagaagcaaggacaaaggcatctaaggactgtgaaggcagaggcagtgtcgcccgcaccagcacgttttcacattccagtgtgcagtgttgctagggctccaggctgctaagataggccattctgaggatccgtcctggcccatgtgtgaagcaaggatttaattcactcttccttcctagaaaaggaagagtgtccttctttcacatctggtagtgactttgagtgacagactctctctcagaattgtgggctatgtgacagtgtagatcatttaagtgacaggagtagcagggactaatttaattccattttcctttcgggccctgctgaatcattgctgcagggaaagatacatttcaccttctcggaccaaaatgattcaaataacgatgtgttctggagaagctgggggctgaatgacagtctgttagtggactttaatagcgctgcatgttagtcagctctctgtcaccataatcaaatacctgagctaatgaacttagaaagagaaaggtttgttgttgcttacagtgttagaggttctggaacatggtagggtggaccaagcatctgtggagatgccaaatgtcagcaggggagggggcagcatatgccaggaactaaaaagagcaagagagcgctgccacaaaagactccctccctgcccacaatgatctagccccctttccctgaaccacctttgacttttcccaatagtatccctttggggaccacaccctcatcgctaggtcctttgtgggacttttattttttttaaagatttatttattattagcagggtggtggtggcgcacgcctttaatcccagcacttgggaggcagaggcaggtggatttctgagttcgaggccagcctagcctacagagtgagttccaggacagccagggctatacagagaaactctgtctcggagaaaaaaattattattatatgtaagtacactgtagctgtcttcagacactccagaagaggggatcagatctcaccacagatggttgtgagccaccatgtggttgctgggatttgaactcaggacctttggaagatcagtcagtgctcttaactgctgagccatctctccagcccccaggactttttaaatgttgtttgtttgtttgtttgtttaaatataggagtgctctgtcactgagaatgattcatgccagaagagggcatccgatccctttataaatggttgggagccaccatgtggtggctgggaattgaactcaggacctcaggaagaacagccaatgttcttaactcctgcgccatctctctctagtccttggggggagtggtggtgggggtgtcttttgatatctgtcgtagtttcttttcctgtcactgtggtataacactctgacagaagcagtttgagaaagagttcaaaatacagcccaccatggtgggtgagtgaaggcagcggggactggaagcattagctacgtctcagccatagaaaaggatgaaggccagctactacttggctcattttctccacgtatacagttcagggttccaggaaagcattgataccagcaacaatgggcaggttctcctacatcaactatggcaatcaagagagtcccctatagacagacccaagactgacactaaccagagcatccagactgtagcaaacacatctcagaacttgtcacaaatgcccctgcctctaacctggcaaatggcttataccaggttcttcttctgggttgaaggagaacattatcatgggattataactagaccttgactgaatatttgtttttagggcaccatgtcagaaaaaaaatgattatgttgctccctggcttctacgagttgttgggtgaatagcaaaagttaagactctggactctggcatcctggccatttgtagaattaggcagtctcaatgaggatgggagttggctgatggttttcatccttccgcccacactatggtggtgacttaggatggtagttctgcagggttctaacatgctaccaggggtgggttatgaggaccacttccagggtggtacggggaaggagcacccagtagattcgaggacacgtgaaatgaacatggaaccaactattccctataagaggacggtggcgtgcgggcctgagctgtagggagatgcactttgtctaaatcaatagttctttgttcaactctgttccttaaaagggccagaggggctctaaggctgtgtctcagacagtagaatgcctacctacctgcctgctcaaagccctgggtgttattcctagcaccacacgaactgggcatggaactgcacccctgaagcctgaagtggtaggaaaatcagaagttcaaggtcaccttcgactagatagtgagttcaaagccagcctggaatatatgagaatttatcttgttttttaaaaataaaagcatgagaatgtgctcctaggactagaacccacatgcccctccactgcccactggccctgtgctctcggtacaaacaaggagcccagaggaagtctggctctcgtgattgacagcaagcaagctagtgggatttccctactccgcatcaacctcaattgcactccagtgccagcgtctgatggactcaggcatcagcagaaactataaaaagccgctgtcagggagcagccgtcctttgagaagcgtgaatgtaaggtaacgagcagcttcggcaaggacgagtttattggagcgagaaagctgagttcgagcagacgatatgacatctacttccacctcacaggccgcctgagaacaaagcccaccgctgcgctcacccggctttgggggagcttcgggttggctttttttttttaaacccttactgcttggaccctaataaacatcctagaactttgagtgaggtctggcaagctattgaaaaaaaaatacacatttgtctttttcaaaagttaggtctggattctctcaaaaaaaaaaaaaaaatgagagaaaggcctggagaagacactccagctatgccgtggtttgctggctctgctcatcatttaaattccacgtcagagaaagggaatttcgtgggcttgtattagtcacttttcttgttgccatggagcaatacctgtcagttgattgacataagaaagggtttgctctggttcacagtgtgggctaccatccttcatagtgaagaagacagggtagcagagtgggcagcggatggccacatgatgtctgccatcaaggagcacagagacgactgagcttgtagattcctttctcttcaatccccgtccagctcatggcatggtgctccccaccttaaaatggatcttccctcctcagttaagcctctccagaaacaacacgcacgcacacgcgcacgcgcacacgcacacgcacatgcacacacacaccaggcacacatagaggtatctcgtgggtgactatgaatccagtcaggttgacaacacagatgaaccatcacagggcattgctagctcgaagttttcagttcttaggcgtagcagcttggtgcgtacaccacgggggaggggctgtgggaggtgtgtgcacgtgagcgtgagaaccaatctcaaatagcattccttgggagctcgccaccagggtctcctggcctgatcttgcttattaggctcgactagcaggtcagccagcctgacggatctgcctgcctctgcctcaccagagctggaatgtttctctcatgggtgctgggcatcaagcgcacgtcctcatacttctccactagctctttacaagctgacctatctcgccagtcccttcagattgcttcttgttgttccttgctgtcgtggaggcccaagaagccgatgatttatggtgtccttgtctctgatcacaagggggaggggctagacactagcatcctaggatagtgagctatcctgatttgtgctgggaagaaataaaattgggattcagttcagaatatttgctgatcttccacggagcagagtctggctcccagcattcaaataaggaacttcagtaccatgggatctagtgccctctactgtccagtgtaggcacctatgcacaccacacacacacacacacacacacacacacacacacacacacacacacaagtatgtccaagaaaattagtgactccaagaaataccacagagatggagaagagaggtatggagggaagagaggccacagaaccttagcaataatatgccttatatccaggaagttaaataagttaaataaggcccgaacaaactctaactttttttctttcccactcctcttcctccttctccctcttcctcttcctcttcttttttcagcaagctgcctagttgggccagagctgttgttcccaaaatattttatgtgaccgagaaggcgtggaattattacccatacaccatcacaggtaagtcctcaggacaggtcagctaccagcagcaagtacaggctgagcactatgggatttcactgggcggggacagactgtctccatggggcctgttccgaggtcttctcattggtcggtcccctatattgtgcccacacacaacttgttcagttgggttgttgctattttgcagagattctctctcctctcagagaatgtggaaagctttaatgcctcttctttataatgctttccgttctgaatattgtatcagcacagtacccccccccaaccccacaccagactctgaagcttgggttgtagcccccccccagacactttgggggggggcagcatctcaggatcccacttcagcatctttgcaaagttctttgtgaattgtttaaaaaaaaaaaaagaaaaaagaaaaggaaaaagaaaaaaaggaagacaaagagaaaaatcactgaaaagatttcctctgtggttaatgaaatgctctactggaattattagcctctcgttctgattttacaatgccaacacttgggttttttaattagctacaaacctataggctaattgaatcttgtctaactgacctgatttggccaaatgaaggagtaccatgaaacacagaggcattcgggatttacaaaaatccaatttttttagcgcattcttaacacttataacttgtcaggaactatcagtcgtttggtttgtgttccatagacctggtctaactcattgtttttttctccttttctttttgctctttgccatctgaacgtctggaatcagaatacactgtaagttcatttaattttcaaaaatattctgcctatgatctgtgggttaattgaaatcttcttcatatttgtcttatagatgtagtcatttttttaaaaaagaggaataatcagaatcagaattatttaaatgtaggctattatataattttacatatatataattcaataagctaagtgttctcttttttttttcaagaatattaatgtaactcaaagtgccttaatagtcactttacataattaacttgggcttgcaattctttatatagcctgactgctttactggtaagagttcactaataaaagagtgtcttgcaatgtggcattaaagacagtattgttttggtggggggaggggcttatacatgggggagatgcatatgcaaatggtcatacaggtgttagagtggtcggtcacttttgcttgacaaactaattgaagtccttagtaaggactaagtaaggactaagtcttacttggcttcctgttgctggcataaaacactgaccaaaggcgacttgggggcagaacgggtttatttggcttaagcgtcctgatcacagcccgttatgaagggaaacgagggaggaatttggaagaagaaactgatgcagaggctatggtggagcgctgcttaccagcttgctgctcttggctctcagtgtgcttgctctctaatacaccacaggaccgtctgtcccagagtggctccgcccacagtgggctgagctttcccacatcaatcactaatcaaggcaagggcagattccctggaactggagttacaggctgttctgagccacctggtatggatgctaggaccaattataggtcctgcaagagcagctcagccgctgagccatctctccagcctctttctctgtatattgaatgatcacgacggggtggactttggaagcctagggagaagagatagctcagttagtaaatgcttgtctcaaaaccacgaggagctgagttcacatcctagcccagataccagctccacatggaaccttggcttggcggtgtacgtctataatccagtactgtgggaggtggggacacgggcggacccttgacacttattggctgtcagccagactgaatgatgagcttctggctcaggaagagaccttgtctcaaaaaataaggtggcgagcaagcaaggaagacagctaacatcaaccgtgtgcttactcatgaacatttgcatgcacatacgcacccaagcatacatatgataaccacacagtgcgctcccataaagatggtggactttggagttggttgaatccttgacttcagtgcctccaaatggccttcctgggggccttcatttcctcgtttagaagtaggggagctctcactgtctcatgaaggtgtagtggaaacggtgctgaacaattggaatctcagcctagtgctgggtgcaaggtcagtacttagcacgtgtcggctggtctttgtaacattgtagcagaaggctctgttctcccagtggactctacttagaagcagagctcagtccctatcaagacagaccgggctccagctgcagtcatggaaggaaggactgactagggagtgagtattcaatgctttccttcttcccactcggaaagattatgcctctcatttgagatgaaatcaatgatgatatggacaaagagatttgttacgtttaaaactgcatcaaaaagctagacgtggtggcctaagcctttaatcccagcacttgggagacacagacaggcggatctctgtgatgccagccatggcttcacagtgaaactgtgtcaaaaacaaagacaaaaaaacaatgattaaaaaaactgcacaaagatagtcatttgcctggagccttagaattaaaccaccttgacttgaccccatgtgacatgtgaatgtcatagtttttgttttgttttgttttgtttatttttggttttggtttttttggttttggttttggagacagggccttaccacgtagcccttgctggcctgaaacttgatttgtagaccaggctggccttgaacagagaaccacctaccagtgccttcctcccagggtgctgggcttaaaggcgtgcatcatcatacccactcgtgatacataatagtgacagagaacacatgtctgaatgatgttactgtgtcatttctaaagaatattcactactttatcattgctgggaccaggaacttggggacggaagggtttatttgtgttcacagtgagaaggaacacaggtcatcatggaggggaaggcatggccccaggaataagaacctgcttggtcgagttgtatccactgtcagagtgcagaaagcaacgaatgctggccttcagctttctctatcctttttagtcagtttagaagccagcccatgggtgccacccacattcaggactatctcacccctttcagtccaatctaaaaacccctttacagacccggaaattaaatgccaacgtttgacattgctgtcctgtgcggcctagaagtcttccaataggatcctcatttcctcttgagggcttctcgatggctggaacttctgccaagcctctgcccaccagctttcttgcagcgctagtgagacattcctgttcaaggaaattgggtgtggggggcacagtattcaaagaggaagcccattctcgttgtccagcactgcaccatatgacgttctgtctgactcagcattttccttgcctcccccgttattctggccccatgtcttttgcagatttctttcttcctcaattcgttgggtgactgtccctctgtctgaggtcagcagtcactcactgggcagccaagtgtgcagagcatcatgtttaatgttaccacagggctcttggcaccatcatctctgccctttggggtcataatctcgtggcaagtgcgtggccatcctagtcaaagtttcgtattgtcagcaagtcctagggtcttctagaggtcagagaggactcagctggcctcagacgtgtcccacaggactgcataatcagcaagctgagctgcctgcctgccggctgaggatcagactagaggaaagaagcgaagatcatttgggggactccgggccgacaagccactgccacaggaaatgaaggcccttgacctctggtttgagctttgagttcagagacagtctgcggggtgcccagtgcaggccatgggagagggtagagtacaacaggcttaagctggggttgattcatggagctaagaggtaaggctgttagccttagtagaggaaagtaaaggctgcagttacatgtgaattttcggataatatatataatatatatataaacagataatatataaacatacacatacttatatgtatatgtgtgtgtgtgtgtgtatacttatggtatcaatatgtcctacatttatgggacatagtctaacctgtatgtaacagccgatgatagggactcaagtctgataattagattataaggactgagacatctatagtcaggtgcaatgggacaggcctttaatcccaaaagtcaggagtcagagtctgtgagtatgagaccatttgtccacatagtaagattctgtctcaaaataaataaataaataacaaataaataacagagaaaaaaaacccaacacacaaaacaacctgagattccctctggatcagggagagaaagaaatgctaagggtatataccaggaacctagccacatctgatatgccacggtaactccaaggccaggcaagggctctcagaaagccttggaaggcacctcctggctcagtcacgcttggtataggtggtaaggtggacagctggggaatgttaaatgtgacaattggacacatgactgtcagtattccttcttaagagagaaatgtgtctgttgttgttgtgtgggggtgatttgcatgtgagggtgtgtgtgaatgccgtagcacactcgtggagcctgagagtaatttccagggcttggatctctcattccattctgggttctgggatctaactggggtcataggacttgcctggctttctatccactgagctatctccacagaccaatatttcttttctttcttcctttcttgtttaaactcctgtctccatatgcatgctggaattacagataggcatcaccatgcccagttaatttagtactacggcttaaacccagggcttcacgaaatgcttgccaacaaatttaccagctgaactctcccaggctttttgttgatgatggtaggcttgttgttgctatccatttgtttgtctgtctgtttgtttttgagacagggtctcgaatgtctctggctggcctcaactcactacgtagccaaggatagcctgtcggtacttcagtgttgtatgtaaatgttatgattggaatatatatggcctaagtaaaacataagaacgtgtctggcagatagtggttaacctgggggagggcagaacttacttcgcagacatctgccatgttgtagcttggacacttagatgaattatcatagactaggcaatttaaaacaacagatatttattttttgcccttcctggaagctggaagtccaagattaagatcacttccagctctgttcctggggtgggctttcttcctggtttacaaacagcaaacttctctccacatggtaagtaacatgggcggtcaagaaagcacactttctgttctctccttataaggaacaaattccatcttggggactccatctttctgatcatatctaaacctacttcctccttaaagtctcagctctaaatattgggagttagggctttgacactgaagcagggacaggacaattcagtgtatagcatgctgatctaggcaccataaggtaggtactgccactggatccttgtcatcaggaagatagcaattcagaaagctgcaaaatgccgggtcagagtctacgtttagtctccgtagggaaaccatgttgttcctgatgagtctgcgtttattttccattccaaaataggcctgcttttctttccatctcccgggccactggggatctgaaatgttccctctggctccaggtgcactcctgcaggcctgcatagcacatcctgcagccgccacccacggcttgggctgggccgcgttctcacgctctctgcccaccctgtactctgaacacggttctgcaccgggatggctggcggatgctctcaattgccttcctctctcccggctgcaccgctgtctaattgagctccttaccccccaatcctttcatcttaactgcctctctttttgatgtctttctcaagttcaagatttcctgtcctacatcccaaaacagaatttctcccaagactgccagagagttctttctttgaaaggcagcccctggggccctacaaactccaaacccatgatcctgcacgttagcagtcatccagagctgtagtaagttcaccagtagctctctgtgactgtccagtctgtcacctgaaccttaacctatcccctcgctggggacaatacccatacaggaggactttctatgtagggtcatttagaggtcaacctgatcccagttatcaagaaataaaaagcttttccgtcactgggagtgtattatatagagacgtcacttgtccaagaagtggaaaaaatatctttaacttgattatgggatgggggtggggtggggatcttaattacacactacaccaagaatagtgtgacaacgttcttccagacagtagatcgtttagccagcccttcggaaccaccagctcttctaaagtttatcaagtcccaaaggaaggtactgaagacattagctgccatctgaactgatgatgtggggtttttattcttgaactaaaatagaaagaaaaagaaaaacctccacacaagccaacagtgtcaagccccctgtgttacactcttataagagaagaattccttccttcttgtaggaatttgaagttttgtaatgttcacaagagtgtcctacagtgttcagtgggtgcatacatattgatgctataaccacacccctccatcaaattcatcttcaataagaacccatggaagagaccatggcaaatgatgcacctttatattcatgtaggtcaaactgaccttgaactggctatggagctgaaggtagtcttgagcttcctaccatcctacctgggctcgcaggtatgcatcaccaggtccagttgatgcagtgttgggggttagacccagcactgtgtgcacggtaagcaaacactccacccactgagccaaagcgctagccctagacacaactgtctggtagttaaaatagcagctgttccacaaaaagaccgagctgtgagcttgggatggtctactgttactcatttgaatgattcagatgaaagaggacgaccaaattctaataactaaggagaatcaaatgactctttcgatcgattccccgagctgtgttgtgtctccgtgaggcctagggttagcctagacaaaccctgcacaggtgagtaagggacagccacagctgagagtctgtcaccagtcactcaaggagagcacagactctcctcccgggaatggcaccatggagacagatcccttccacacctgccttggagtcccagccaacgtgtcgtgtaaactactaaattacataatgacggaaccagggacaacgctggggaaggatgtgtttattatatcagacctcgaggacttgtttggagaaccatctggtcagccatggaagcgaaaagaatgaaggtctccaaggtgtcccttctccagggtcacgcagacatagttagctgatgaggaaaaatactttcatctctgttgggcagttaaccctgactccagtgctgtgcagttttggatgaataagtgaatgtccctttttttggaaataggaccatgtatgggctcaccatggcaggccctgtagcactcaagagactgaggcagcctgggctactgttgtagtttgagtacagagtattccctagatggttcgatttggggacaacctttagaaggtgggcctatatggcagaagcgggtcaccggacgtagacctctaaatgttacactcggcccctgctataccgtctctcagcatcccaacccctgactatgtgaacagtctctgccacaggctcctaccaccatcatctgaactgttctgccatgccttcttctctgtggcggactgagccttctaaaaccgggagccaagataagtctctcctgtgaattgtttctgtggacattttatcacagcaatgcaaaagtaactaagaaaagtagcctcataaggaggccttgtctcaaaaacaggaaataaaaaaagacgagggaaggagaatgtagaagaggagaaggaaggatccagcaaaggaagaggcacaagaggggagtgtagttgcagatgttagaggccacacttagtaaggaagtctctagccaagggacattgataaacaagacagcgttgtcgggcacagaactgaagaccttcacagacaatacagtagtgaacacacaaatcatggcctgaaacacatgtcataaatagaatcagatttcttctgcaaacgtcctgaggggttcagagactttgggtggaaacagaaccgttcatagtgacaagttaagatggcagagagaggaccacatggtggtggctcacacctatagtcccagcaccccagaggctgaggaagagcgccatgagttcaaggttagcttggtatacatagttaagtggctatgaacaccattacagctgtggctatagaaggggagcttgtctcaagaaaacatgactctcaaaagacaaccgaaataagaagacacacaaccagctaggtaagagaagagatgagcaggcttctttatagtaaaagctcttgcagcctttgattccaagggacctgcaatctgtaacacccccacatttgttttatttatccatgggactttgtaattgcaaggacttaggggagttctagaagtttctcttggagctattttttactgtgacataggctactggatcagttctagccagtatatattgccttcattaagctaatatgttgtctgtagatgattattgcttagataccaaggctttcattatggtttttttttttttttaagagtactcaaccatattgaaatgtttggtattgttagatttgggtggtatggatcctggatagatttctttctaagcaaatcaatgccttaagtcacatagtaaaggtagcattgggttgaaatgcaagctctatgcatttagatatgtttctctgttagcttcccaatactgtgacataatacttgagacttgtctaaattggcttatagaagagggaggtaaaaatttaatttagttctcattttcagagagttcagccttgtcactttggtcctctggtaagatagtatggtgggcatgtgtagatcagaagaaaattcctcgctccatggccaagacacaaaagaagggaggagaccagggtggcactctcccctttaagggtacacctgcaattgcctccaatcctcccattgggacaccgccttccctccccgcccccccccaccccccctcgccccgtcacacggctagtggaggagccttgaatgctaggtcttttagagacattcaacttccaaatagcaacagtgtccatgtgcaagatgtctgtgaggatcagccagctgtaaagcaaaagattcccccaagccatggtgccgggtaggcctgagtctcccagtccagcatccagccaccagtgcctcgaaagttggagccttgagctgctatttctgtgacttgcgagctcagagaaaattaattcagccagtgtgtgcgtgtgtgtgtgtgtgtgtgtgtgtgtgtgtgtgtgtgtgtgtgtgtggtgaggaaaagatgattaaagcactgtatctgccataacagtgtagagtcatctgtgttgcttcttcaggaagacaggacatgggacaggcagggaggggtaaggggtactgttttgtttataacgttttgtggcgtttatttctttgggagtacatgctatgggactatcttgacactagaggacagcttgcagcagttggttctctccttctaccatgtgggtcctggggatcgaacttgggtctttaggtagcacctgtgcccgctgaacctctgtctagccccagaaagaaaaatgcctttaaaggactcctcaatagttttattcaaaaataagtcttttcttctgtttattttctacttgatggcatgtaaattttgctttcttttgtccatttttgtgcatttgtgtgcatgcacatgtgagcatgtgtgcatgaaagcatgtgcgtgtatatgcatgtgagagtgtatgggaaagtgcatgtgtgagggtgtgtgcgtgtgtgcgtgtgtgtgtgtgtgtgtgtgtgtgagtgtatatgaggaggaagcaggtttcctatcctgtcagaaaccatgttattcccttgggacagggtgtctgtgtctctgtctctgtctctttctacctgactctgagcttgtagcttataccccagtgaccgtcctgtctgtccctacagcgctggcattacaggtgtgcaaggaaccacatctggcgttgtatgtgaatgctgggatctgaactcagctcttcatccttgcacagtgggcacttttacctgctgagccatgatcagcccgtgtgtaccatcttaacatctcctacctactttgcctgtatttgaggactcaatgtcgctctttcctatctgttacttacacacggtctagggctcgtggggttggtcagcctgtgtctttaaatccatgccttgccttgcctgtgtgcagctatcagtgtgcacacataccctctgccgtgacaagcctacctccggatcgtgtgagcctgaatttcatttccttgccctagaagtgccaagagcaactcaggctccattcagaaagcaagctttcattcatgcatttagctccatctccctcctgcccttgctcctccagtgagttacttattccctgcttgagagaggacggcgaaaggctccatcaatgactgaattaatgaatgaatggagcggtgtgctgggtgcggctggcagctacgcagaaagcccaaagtgtatttccttgccgtgggctgggatacaggcagctgtttccagctctttccggctcttacttgcttcctctcaccctcctccacttctttcagaccccgccattcttcttggccacgtgcatcttcctgtgcagcgtatatttgggagtcactctgactcatcctcttcatgttatttctatgcgattctttgtctcgtcttctcagctctacgattcttttacttattttttttccacttgagttctaaagatgcttttccagaaatatcatctccgtagtccccctcccagcttctctttcagcatcaccacagaccctatgtaagggcagtcatgcatggccctcagaacccagacagcatgattgtggagaatctgagcagatgaggcacaagggaccacgtgactccttaggactgtgtgtgttttaaagacgtccagacactaatgagaaattcttactttgccttctaaggcaaaatttctgccagtgaagaatggtaaagtggctttatactcccagcactcaggaggcagaggcaggtggatatctatgagtttaaggccagcctggtctactactagatctaggacagcaaggactatgtagaaagactgtgtcttaaaagagaagccagataattgaagatcaagatattagaagtgggatagtattaccttaaaatctccatctcaagatcagacacagtggtgtacacctggactcctagcacttgaaaggcaagtttgaggccagtctagttgagttccaagccagacaggttgggagaggagcgggaggggtgggttgctgaggggggtaatgggggctggagagaagagggaaggaagtgggagaggattaggaagggaagaaaagtggggggggggagttaggaagaaaacgtttgggggatggggccgtggggagatgattcattgcatgaagtctttgccagcctagcatgaggactggtgattgaatcttagcaccgatggaaaagcctgacgatttgtaaaatgtatgtttaaaactctagccctgaggaagcattgaccgatagagaccgatagtttaccagggctcactgagactcactggccagctagcctggcctgctttgtgagcgcgccagacacatgagagatcaggactcaaactaaggtggacagttcttgaagattgatacctacgggttacaccactggccacaacacaggcacacacacagctgtaagggagggagaagagaaaggagagatggagaaataaggaggaaggagagacagggagagagagagaaagagagagcactaaagacaataaaattgaaatgatggtttagataaattttatttgtctcaagttgaaattccctgtctgacctagacaacattaattgacagtatatacaatatctacggtaccaggcaatcgctgcgatggtcaggggactctcttagaaggaagaacctgagtccttgtggagttttatgtccgtgatatacatcatgctctgtcaggacaagatagcaaggaacaaattgggttccagataaaagtttaaggaaatgcttttttttttaagtctataaatatttgctgaccccaaaagagactttttgaatctcttcactccctggtaaagttctgatctcagataagagaagatttgggctgaagagatagcatggcaatttttccttttgaggaaaaatgggggggtcagaagttcaaggtcatcgttggctatgtagcaaattccaagtgagcctgggttacaggaggcactgtctcaaaaaaaaaaaaaaaattacagtacaatcaagagtgttgtgaatgcaactgaactgtcacactgctctctgatcctttcttgttttaaatattctgattaaggctgacgtgtgatagtccggtaccaatggaatgagtacctcttgagccttccacacacgcactttgtttatgatgtgcagccctgcaagttaaagtatataaaggttataagaattggggtgggggtgggggggggctggagagatggctcagcagataagagcactgactgttcctctgaaggtcctgagttcaattcccagcaaccacatggtggctcacaaccatctgtattgggatcagataccctcttctggtgtgtctgaagacagcgacagtgtactcacatacataaagtaaataaatctttaaaaaaaaaaaaagaatctggggggtggtgtatgtagtagctgcaggacacactgagaagctgagcaacaccagtcccctccatggagctgcagcccccacgtgcccaaacacttggccctctcttacttctaaagaagccacttatgggtatatgtacttaccccagagaggtaggcaacctgggttgtgtctcaacccctccctgttttgcctttcactctgggcacaatgctgggccttattggacccttggttctttgtccagttgggattagatggggactaaggaattattaaatgagttcaaggatgtcagttatctcagacaatgctccttggaaataagtccgtagacatacccaccattggtttcgcctcagtgttaggtcttgagtggaacattttctgtgtctactctggatcatcgtttttcttcatagatgctcctggacttcttacagtcaggatacatctgctaaatacaagtgttgacaaggatatgctcatcagaaacttcacactactggtggcctttggagtcacctggccacttcccaaaagatcaaacatagagttactttgctgcatagttcagcattcccatcctaggtatctacccaagagaaatgaaaacccaggcccacacagaaactggggcaagaatacccacagtgctattgtttatgacagccaaaaggtaggagcaaagaaaatgggtagggcacatctgtgcaactgtaatcccagcacttgagatggaagcatacaatgacaaattcaggccagccactgaggaatggagaaataaattgtggtatatccatataggggaatacaactttgccaggaaaaaggatgaagcaccgttatatggtgacatgggaaggggactaaacacaaaaggccacatgttgtgttcaatctgtatgagttgattaagcatagagaccacggaggagcagtagcttgtggtatgatgctgagggaaggcaggaactagcaagtgagtgctcttgggtgcagaatttctccaaagatgatgaagtcatcttgaaattagatgtggttgcacaacttgagacctacaaagcattattaacgagtgtccctactatgcacctattatattaagggagttagtttcttcctttggtgctgtgggtggaagccagggtgtcacacatgctaaatgcgtgctctgccacctcacacacactaaccatgtgctctaccccgggaacatgttaaccatgcactctaccactgagctaacccgcatctcagcccttgaagaaaagaaaaagaaaacaaaactctagaggaaagtcatcagagaaagacccagcagctgtgtttctcaggaccaacagatgaggctccatcacctagtgatagaaatgacctttcgggctggtgagatggctcagtgggtaagagcacccgactgctcttccgaaggtccagagttcaaatcccagcaaccacatggtggctcacaaccatccgtaacaagatctgactccttcttctggtgtgtctgaagacagctacagtgtacttacatataataataaataaatttaaaaaaaaaaaagaaatgacctttcagggagaatgttaattgtattttttgctagaaaatgcccaagcttacagcatgtaagctctaagtcacatgccagaggaatattgcatcctggatgacagtctgaagtgaatggtccccatggtcccagaaatttggccactccctgcttctgaaggtcaagggccctggagacctttggacttgtccccgtggcccctataattgtgtgtgccagaggtagcatccacagcaagggttttccccacaccctccaggtagactctgccgtccccttgagtgttcgccctttctctttaagacttcagattgcttacatttacttttgttctcataagtgtttcttatcaccatagcaaccctaatcaatcacaggaccaaaaatagctctttcgtttcttccaaaccatgtctgtagtgaattgggagctcagttccaccttgcattcggtacaagctgctcgcatttcccgacagcgaacctgggagggctcgtgtctggaaattattcttgcagaggcccagacgcctcacatcatcgtcctccctacctcatcgcctctcaaaacttcaaataggtttttttttttttttttttttttggtttttttttaccccagtgttcaacagagaatcagcccctctgcatgctaactctttctggtggagcttttgccagtactgtatgatcatgtttcagtgggaggtttaactcagtagattctaatgggatagatggccaaataacagatccatcacacaaatatggcacacaaagccagtggtggcagggagcagatggcgaggaccccagtgtccttcttcttgggggaaatcaaagatacagtcatgagacaacgtctgccctgttgccctggtttcttgatgaccctggtgcagtttttcagaggggaagcgtgctcaggagtcagtgcctgtaagcagaatcctcctcacacagggctcccggttgttacattttttttttcaaattctatattgtagattctttgagccttgggttttgtaggctaagtgaactggtggtggccatattagtctttatatataggagacaagaaggcccttggtaggatttttgtttctctacaggaagtggtccaggtagaatgcaagccaaaagaggggcggggggtggggggcttcatatccacagtaccagggcaggccatcatttgcgtcacgggagggaccagtcaggtgttcagcctgtggtaagcactccagcaaggccaagtcttcaatcgtgtgctctcatgagtgcatcatgccaggtctctctccacccctattctgttagctcatccacgctgctctgggagtacatggaattggccaatgccaccccaagcctctccccccagaaactgcctagcctcagacatccactgcctctctaatctttgctatgatgctgatactgtctacatgtatagttggagacgtttaagctcagactgatgaaggcatttgcggagtatcaccaagtatcacctggggcttgaacgaacgtctatccccctccacacacacatggatcttgattctaacaaaacaccatccttcctccatgtgggcaagatgcacacttctagatgtatgtgggcagtagctgggggcaggcttcttggtgttagcgggccaaaagcagtggacatcgacaaagcccttataggtcagatgactaagctgggaggagcatggggtccccgggtgtgttcagacctcaaattgagtgacacttccatggatgagggccccagggccatctggaaggaaacagtgggcaggctcttccattgtcatgaggcagatgtcgtgcaaaactcagcacctgcaagcatctatcagttcattgtcttactgcctccacaggagtaggatgtatgcttaggttagctgagttcttggttgggttgaaacagaaatgtcagccatggctcacattgcatccagtcttctgggttcccctctgctcccccggtctttcgcttttctgtgactgaaggactggatccacactctccattcaaggctttactccaagctttgggaagctgagggagtcaggttagcagggactaatagcaaaatagcgaaatcctatccaaatgaataggtaggcaagcaagcaaatagagcctccaggactgactcaatctcaggcctgtcaatcagagactccagcagggatatccaaacttttgacaacgcagtgtgacattgtcatctgagttgcgccacagtcatatctatcctgggatgcatgcaacctgtgagccacaggtaggacacatctcctcagatatcctccatcgaagcccaaccagccctttgtggtctcagaatggaaggacaagtgcctgtggctccggggccaattcagaactctgtccactgtgactttagagtctttgcttcatggtgtaggtctcttgatgcactgtgtactcccaaatgactcttagaaagctcaaaaatctcccagatctgtaagacttctcctgctgtagacaatgactcagctgctggtatctctcttctcacagcaggttcaggtatggtcgtatcagggtccctgatgtcttctccctcgtgacaggtccctcagtgacctggagtccttctcatctaagggaacaggtccatggttttaggagatgatacaaattttgagagtccagggttggtaggtgaaggtctatcctcttccctgctgcatcaggctagtggtttagtcctagctgtgaaaaaataaaataaaatcattgaaagtattactaaagtaacttgagtatgcagctagtattctgaagtggggtggctgatgtatgtcatccccaatagcagtaaaatcttgtcagaggtcatcatggctggagggctaacgtgggtagcgtgctatggtgacacaggcagactgacatcgatcattcagagctggcgactgagatggtcttcggctgggatctccttgggagagctgtgtggacaaagcctaacagctagaggtggtgagaatggggactgggcccagactgtactgccacacccatggctcagaactcctaccaacgctacttcgggtagcggcctgggctgtagaatgagtttgtggctgctctaagtaacccagtgagcccctgtggcaaatggaaagtaaaacggagcctggtggggccagcaggatggttcagaggacaaaggtgcccatgaccttcttagtggcatgaagtaaatcccgagggctggcatggataaaaagacaggaccagtttccacaagtcatcctctaacccccatatatacagctcagggtagagtgaattcttagcatacagaaagccctgggtagcatccctagttctagaaaaagagaaaagagccgggtggtggtggcgcacgcctttaatcccagcactcgggaggcagaggcaggcggatttctgagttcgaggccagcctggtctaaaagtgagctccaggacagccagagctataaagagaaaccctgtnnnnnnnnnnnnnnnnnnnncctttgacaccaattccagggtattcaatatcctctcctggcttccttagacactgcagttagacactgcatgcatgcatgcacgcgcgcgcgcgcacacacacacacacacacacacacacacacgacttttagaaagttataacatcttgcttttgttttttgtttgttttttggtttttcgagacaggatttctctgtatagcccaagctgtcctggaactcactctgtagaccaggctggcctcgaactcagaaatcctcctgcctctgcttcccaagtgctgggattaaaggcatgcgccgccaccaccctaacacatcttgcttttaaagagaaaggaaaaaaagaaagaaagaggggacacagatatgaaggttatgtgacagagctgtatgccccacagccaggattttctgggcccatcagaagctgaaggtgtgcaggatcgcttgtcctctggtgctggagcagaaaatgtcatcttgtccatacctggatccaaggtttccagcctccagagatggccaataacaagtatctgttgtttgaaaccaccaagtctatggtgattcattttaatgtctctaggaagtcagaacaggccaggtgaaccttcacattcagctcagacctttggggttggtgagtccagaggcctgggggtgggtggcccatggcagctggagatgtgggaagttggaattagaggtgttggtttgggaagaagcttcacaaagtggctgcagaaaagcagaagtgtttgagatgggggggcgggtactggagcatggagaggaggaggtggtgggacagcttaaatcggggtgtaggggcgtggagactgctaagccagctgccgtgcagagtggaggaattgtgtgggcatatggccagtgagggcatctccagggtgtagatggaaaaggtgatgctggctcagaaatgctttgagtttctcttctccatcccagactgtaccaggtaagaagaggagagaggccgaaggggagccagcaatctctggcgtttgatggtgaagacaaagagacagggttggttatagacagagcaagaagcagtcagaaatctcagtgtttgtttgtaagactcggagagtgcgggctagagaggtgaatgctcaaagatgagagagcttgttctacaaacatggggggcgaagggcattcgtttgcatcttagcacccagggaacaagccaggtgagcacaactggaaaacataagccccaggctcagagaaagtagagtgagatagaagaaatgtaattgccctcttctggcccctgtgtgtgcacatgagtgtacaaattcacacacacacatgcacacactcagccatgcacatgaataaaacacttcttgtgattgggggtcataaaaaggagacaggaaaaagataatcaatcaatcaaacaaggttccaggcaagacatatctaaaggtctttgcatcactctactgctattttgtgctaggatctggacttcagggtgcttgtacaatcactcatcttctgagcttcctacagagtggatggagaaggatcgtccccattctagacatggaatagctgaggctggggggtggtaaaggtcaagatatttcccttttgagcccaagtcattgacaagaacaccagttctgggctggtgagatggctcagtgggttagagcacccgactgctcttccgaaggtccagagttcaaatcccagcaaccacatggtggctcacaaccatccgtaacgagatctgactccctcttctggagtgtctgaaggcagctacaatgtacttacatataataaataaataaataaataaatacataaataaatacatacatacatacataaaaaaaaaaaaagaacaccagttcttctcattgtggtatcacgcaatagggaaacaaagagtgaggtcctctctgattctcgaagtgaatcttgagttcggagtgaagataagcagctaaaggattagtggtggaggcagggggttgtcggtgttcccatcctgaggtctctgtcctcctcaaactgtgagtcagcattgtgagatttgggccagtgaaatggctcagtgggtgaaagtacccctcgccaaacctgacagcctgagttcctatgctccagacccacatggcaaggggagagaacaaactcctacaagctttcgcctacacacatatatgtatgtatgtgacatgtatgctccgccttgccccaccacacactaatgaattaatctacgtgtttttaaaagtgggagagaaagaaaagaaagaagaacaacttcaagaggagaggactgagggttaggaggaatacttggggtaattcactttctaaagcagaaatggaaggctatctaataatggagacttgctggctctctatagacactgccctgcacaagacacataggtttattcgtgtgagtgtgtgtgtgtgagtgagtgtgtgtgagtgtgtgtgtgtaaaggttcatcatcatcaggtcccaggtatcaagcttaaaataaacattttggacttgaaaagtggctcagtggttgagagcatttgatggcccttccagaggaccagggttcaattcccagcattcactcaatagctaagaaccacctgtaactctgatctcagggtatctggtgccctcttctggtttccacagagactacatgtatgtggtgcacagacatagatgcaggggaaaaaagaagaaaaagaaaagaaagcaacccatacatgtaaaatcaaaacaattaaaatctcaaaacattaaaaaaaattcaaaacattattgaaaataaacaacttacccaagagttttaaaaaaaagttttaaagcaactatagcctctgattttctttatatgcagtgtgtttacatgcgggggtgtgcatgtgtgttaagtgtgtatgtgtgtatggatgcacacacatgtaatgggacatctgtagaagtccgaggacagtgggagtcagttcttttctctaccatttgggttctagtggctgaactcatgctgttggccttgatagcgtgcttccccccttctgattttgccttgagacgcgtacatgccagcaccccaggaagaaaccatcagatgtcccaatggggactattagccccagccccacctcacccccctcccccagttctccagccctagatgggacttcttaggttcttatcagcctcttgccgagggcagatgcacctgcagccctcttgcaggcagagttgccattctgatcaggaaaacaacctctcacctccactccaagtagcaacacctgtgaatttgcatacaagcttttttgcattttgtatttgggtttgaaacccgaatgctggaatttatttgctcgatctagaaaagtggtttagaagaccaactacttggggctggggggaaaccactggctggagagagaacctgattggttaactacttactacacaagcgtgaggacctgaatttggatatcctcccccccccacccccaacaccacccctgcactcacatcaaaaactggacgagttggtgcacctggggtggccatactagggaaacagacaagagagttcccttcagctgttaagtcacacattctagtctatctgcaggtttcaggtaacacaagagactatgtctccaaaggtagaaagggatagatagacacgtcagggacacggctacacagacacttagagatacacctctgtggagttttcggttggcaacacagacagattcgcaccttgcattgctgccttctctcgcccctcattggattgaccctaggatgagtcatagatctgcaagtacaaatattgatttccctaaaggcttgttatctttaagaggttttcttcgcaaggatgtctcccgagctcaagagtcagtcaaggttctgccggggggagggtggggcttcaagggtgccagcgtcttgactcgtgatgaccagcctccctccctggaagtcccaggaaatgggtgtgagggcagagtggttaccgagtgagaggttggatgagagacagcgggggaggtgttaataaatcaccacagcgcctcggcctccatcgaggcaattactaggattggtcgtctccatgtttccttagccacaactcggattgcttctctgggattaaagcaggtagatgcacaaggcatatggtttcagggaaactagccatggtacatcctgggctttgttatacaggcatgcctgtggtcaacgggctgacaagggagggcagatacagcggaagggagcacgggagatgcaggctaccttagtagtagatgctgagaccttagctggcctggcctgcccgagaacaaggaagtaaggcagtttccccactggaccgtgcccagcatgcccctcatgggggttgtgcagctcacattgctggactgcacctgcaggctttttggaatcagatgctgtagggtggatactgagacattacaaaatgctgctgctaccactgagctggatgcccggcttcgagaaccgcagagtgtagcactcaagagtatggatactgggaaccaactacttagctttcagtcctgattctgtacggtgctggctgtgtgattgtaggccatctgcttaacctctctatggctccgtttctcatcttgaaaagagcgatgataatattagcatttgctccttggggaattcgcaagcatccaagaacttggaaacattcagaaaatgccaggggcagagaacatagcctcttgggactgtgaccagaacaagccatgtctcttatatctaatacctgcaggtcccagggaaatcactggatccttttaaacattagccttcaatcccatctctggtgtccaagaaagataatgcccagctcagttcgggggaggaagttggatacacccagatctgtccgcatcctcttcccagactgcctgaccttcccaagctaatagagacacagtggggcctggtgagacacagaccctggggcagccttgcaaataaagcctctgtccatcacgcattggccaggccccctgcagcctggtgctggtcactgctggcttacttgttgccgcactgtacattgatgattccgttctgaaaatcaaactcaagaccttacaagcacaatgcacatgctctaccttgagctgtgattccagctgctcgacacactattgttaagctatatatcatttatttatcctttctatgtcactagtacataatgggttaagagagggggtaagggctggctcagtggttaaaagcgctgactgctcttccaaaggtcctgagttcaattcccagcaaccacatggtggctcacaacatctgtaatgggatctgatgctttcttctggtgtgtctgaagactgctacagtgtactcatatacatagacataaataaataattcttaaaaaaaaaaaaaaaagagccgggtgtggtggtgcacacctttaatcccagcacttgggaggcagaggcaggaggatttctgagttcaaggccagcctggtctacaaagtgagttccaagacagccagggctatacagagaaaccctgtctcgaaaaacaaaacaaaaacaaaaacaaaaaaacaaaaaaaaagggggggagggttagaagacaacgttgaaattccaatctttccttcaaccttggtttgaggctgggtttctcttactgtttcttctatgctgtgtaccccaggctagcttgcccataagcttccagaaaggtcttgcctctgcttcccattttccatagaaagactgggagtacagatttgcactatcacatctggctttttcccgtgagtttcagggatagaactcaggtcgtcagacttgagcggcaagtacgtttcctgttgagtcatcttgccagtgctgtaaagttacagattaaaaaacaaattctagaggctgggagcttgcttgttaggtaaagcgtttgctgggcaagcagggtgagctttgttattcgacgcgttctcacgaccggccaggaagaacaccacagaccagaatcttctgcggcaaagctttattcttacatcttcaggaaaagagagcaagaagcaagagagagggaaaagcaagagagcgaaaaagcaagagagagagaaaagcaagagagcgaaaaagcaagagagagagagaacgaaaaaccgtccctcttaaggagcattctccttcgcctcggacgtgtcactccctgattggctgcagcccatcggccgagttgacgtcacggggaaggcagagcacaagtagtcataagatacccttggcacatgcgcagattatttgtttaccacttagaacacaggatgtcagcgccatcttgtaacggcgaatgtgggggcggctcccaacatctccccctttttcttttaataagagcaaataggccacccatattaatgagagtggagatagaggtcaaatccccagtgtgtaggtaaaggagccatgtacaggattagctcttaggcttacaggcttttacccagagcaaccctgacctgctcccgtgtcgttttgcctgggggaagggaactaggacactgaaccttcatgaaagatgacatgtctccctagaataggctcatatatgccgcagagcctttccattgcagtgcttagccttgcaactctctcgggctgctgaagcacactcactctatctcgtgcaatgagactagcctcgtgagatataagagctgagtggccagcgacctattgcctaagcatagatatatcaggggaagctccatgttctagtcctgcaagcgcctgggcaataaccaccttgtctctcctagtttaggccctaagcttacagaccaatcaaagaagcaacaccaatccacagcaaagtgtatctccaaataatattaatcccacccattttttaaagaaagaaaatgctgaggagatccaattgggtaatcctttggtcagggacaggtccaagcgcgtggagttgacctgaatgatggcaagcctcgaagggtctgttcaaattcagccatccaattctgtaacatatactgaaaaagactttttgacaaattagctgccctagtaaatttaacatactgaatggaaataacacacaatcccggaaacttttgttcacatccctgctgagttatttgtcataaacacaacagattgattttgggcaaactgtaagattggatgttttggataatggttatctatttttcctgaaaaggaggtaactaaaactgcccaatcattagatgtggctgccaaggtttgaacctgtgcagcggtataaggtacaattaaaagatatggactttgcccaaagtgggtgattgctgcttttaggcctttaagggcaagctgtgcaattgcatcaggataccaatctattattttagctggggatacgtttggatggatccacaacaatggcccattctgccacaaaactgcagttggcaattgtgctgtcttaaagacacacaaactgaaaggctgcgaatccccaatacgttgcaattgtgcattctgtaaggctttttccaccctttgtaaggcctggttagcagctagagcaagagtcctaggggaggagatatgaggatctccttctaaaatactaaacaaaggccttaattcagcagaaggaatctttaaaaagggtctgagccaattaatatctcccaacagcttttgaaaatcattcaaggtatggaggtgatctcttcccacctctaccttttggggcacaatcttatctggggacaccacagagcccaagaattgtcctgtatcagaaatttggaccttttctgtggctatctgcaaaccccactgacttaaagttttaagtagaaaaggatatgccttttgtagcatggtaaggtctttatggcacaggaggatgtcatccatgtaaaggagcaaaattaaagaggggaattgttccctcactggcaaaagagctttttgcacataaagctggcacattgtaggactattggacatcccctgtggtaagaccctccattgacacctcttatcaggtttagcagaataagctctctgacccgttaacaagtcaaaagtccaatctctctgctctggagttaaagcagcagcgtttgctcggtcctgcgcctgtgccgcctcctgccacagagctcgccattccacatatttggccatactagggagagcggcttttgcaatcatttgccagtcggcaggagttagtgccatgctggcaagcctgtctaactgtaccaaggtaaaattagcattgattccatatttaatctgcacatattctaccggagcgtggacacgcccaccctcggctccttcaaagactggaaatgcctgttgtattttcctttgttcctctcggggaatgaatgagtctgcgcactgcctctctgcgcattgctgacgcaccacgggctgacgcactacgcagggcggggactccgcatagggcgggagtgcacctggtagccgattgccctgaggccaattagcaaactggccttcgccagccgcttctggctttcttcttgaccaattagctggctggtaatgggctgcttcttcctcccagtctgtttcctcagaggaggattcttcacttgcttcagagctactaagagctggcttcctgagctcatctagtgacgagtatctcctagagacctccgctaatcgatcttttttcttctccctttttcctctttttcttctaatctctctccaggtattcctacctaaccttaacttttcctcgggttcaagacccttggaaaggcctgtatacttaccgtttctccttgttcctactctctctctccgctttacttctgatagactgtcctgaatttcctctagaatttttagccctgccttaagcactatataacatgtgaaaaggaacaaaagggctcctaacactagaaaaagttcaaggccaaacatacctggtaaagccatttctcacttccgttccccagctgatgagttctgaattcggcagttgaatccttctcaacagtctgctttacgggaacctttatcaccgtcgttccccagctgatgagttctgaattcggcagttgaatccttctcaacagtctgtgttacgggaaccttataaccttgattcgcagttctggttctggaatgaagtatccctcctgcgccagtccggagttttttctcgtcccggattttctcgtcccggaattcggcaccaattgttattcgacgcgttctcacgaccggccaggaagaacaccacagaccagaatcttctgcggcaaagctttattcttacatcttcaggaaaagagagcaagaagcaagagagagggaaaagcaagagagcgaaaaagcaagagagagagaaaagcaagagagcgaaaaagcaagagagagagagaacgaaaaaccgtccctcttaaggagcattctccttcgcctcggacgtgtcactccctgattggctgcagcccatcggccgagttgacgtcacggggaaggcagagcacaagtagtcataagatacccttggcacatgcgcagattatttgtttaccacttagaacacagggatgtcagcgccatcttgtaacggcgaatgtgggggcggctcccaacagagnnnnnnnnnnnnnnnnnnnnnnnnnnnnnnnnnnnnnnnnnnnnnnnnnnnnnnnnnnnnnnnnnnnnnnnnnnnnnnnnnnnnnnnnnnnnnnnnnnnnnnnnnnnnnnnnnnnnnnnnnnnnnnnnnnnnnnnnnnnnnnnnnnnnnnnnnnnnnnnnnnnnnnnnnnnnnnnnnnnnnnnnnnnnnnnnnnnnnnnnnnnnnnnnnnnnnnnnnnnnnnnnnnnnnnnnnnnnnnnnnnnnnnnnnnnnnnnnnnnnnnnnnnnnnnnnnnnnnnnnnnnnnnnnnnnnnnnnnnnnnnnnnnnnnnnnnnnnnnnnnnnnnnnnnnnnnnnnnnnnnnnnnnnnnnnnnnnnnnnnnnnnnnnnnnnnnnnnnnnnnnnnnnnnnnnnnnnnnnnnntcacacacacacacaaacacacacacacacacacacaaggtggagtgtgactgaggaaaacactcatcagagaccatcagcatgtctatgcttgcatgcacgcacacacacatgtatatacacacatgtgacacatgcatacccatctgaccaataatctctgttctcaaggttgaactgtgatacatgcacacacatcctaattttatatgcaccttagcacatgggttaaggtcaggtccctagtgagcaggtgggctcccctgtcctggagttggccactgcaacaggtgtctacatagccacacctgtgtcaggatttcacattgttggaaatgtcctgggccacaccccttccaacacagcttactgcctctggtctgactcttagaagaaggggtgttcatggtagtggcttctcctacaggatgtggttattaatgtgtgacttactgtgtctgctgtaggcctgtgctcccaaccgaatggtcagccaagcggcccatgccacactaaagacagaaggcaactactctgctgatcaaagtctattttttctccacagtgttccttcctgccgaaattctccatccacatagaaaccaagtatgaagacaacaagggaagcaacgatagtgtgagtagctgctcagagcctctcaatccaagtctcacttgagtctcggtctcccagccctgctctgtgcctgaaacctcagagaggccctggcccattgggaccaggcatgggatatcttatagtctggctttgctgtcttctaatgtgcctgtctttcctcctttctgcaatggaagtgattgcaatgagtggagaggggactcagaaacatcttaaaacttcctaccctgagcagtatcaaattacttacagggcatggctgtatttgtggggcaggcactgtgccaccttgtgactggctagaccataaagagtgactggcagatgtcagagctgctgggcaccttctgtatgatctggggccgtgcctcttcctaagccacctcagattagatcatctccttagtgctgagaatacaagatagctaatttaagagggactttgcctggatggagtttcaatggtccccaagaggtgacgctcaaaactgagttttattaaagctcaccgaaagaagactttcaggaattcattcattcatattcattcattcactcactcactcactcacgaattcatccattcattattcagcaagggcgtattaaacaccttctgtttatatcaccacatgagtcacttggaggcaggaatggtgggtgtgatgatacatacctgtattcctagcactgggtatggggcggcgtagggggaggcgccagggaagaagatgtcaagtttgagactagcctggaaggtctcaaagcaaaggaaaaaaaaacaaaccaggctcatttcccagctttcggatgcctcctgtttacctaggggaccaagatcaacatttctcatagccaaaaccgtgaacacactagacgacctcccagtgtgcaaggagttgtggccggttacgggagcagtcggagggatgctttctataaatactactgtgggcagggatgacctgcctgatgcctagttacgtctgttccttgagtattagctcttcaggtgatggcaaactgctttgttctggtttggtttggtctcctggtcacctattcataggtatatgtatgtgatggtgtgctcaagtgtgtgtctgcttagttatgaatagtgcccaagtgcatgagtgtgtgtgtgtgtgagagagagagagagagagagagagagagactatgtgtatatggaggcctgaggtggatgccagttattttccctgattgctttccaccttattctttgaggcagcatctctcaattgaacctggagctacctgatatagctagcctggccagctccttgttctgggaatcttgtgtcatctaaggagtagcgttacagacaggctgctacatctactaagcatttatgtgagtcttggagatccaaactccagtcccacaggtatttttttaaagtgttttagccactactaactaagctgtcttccctagcccaaactactttctttataaataaagttttattggtacccagctacgcctgctccagaatttctggaactttccagagagaataaatatccctagctaggatagcctcctctcaccaggttcaggaacgccattgtgagcatctactcaaggtggtttcacaaaggcaaaggagaggactgtccccgttcagccagagttcagtgtactttgtgggtcagctttatcaaagccacgatggctacgtcacaaaggatgcatgctgatcttggcaaatggtgaccttttctgattggacagttagtatgcagtttttaaaacttaaaatacgggggtgggtggtttgggggggactttttggtatagcattggaaatgtaaatgagttaaatacctaataaaaaatggaaaaaaaaaaaaaaacttaaaatacacactggaaaaaggtccaaattgaaagaaaagccaagagtgaccccttgattcagagatgaatacccatatccctctgactcccattataggttattagtgattcgtttcctaaccagcccctcccaaattaaatcatacagtatgctgtttttaaccagcatgtatggcatacccttcccaacttgatttgatgtgtgtgtgtgtctgtttgtgtgtctgtgtgtgtgtgtctgtctgtctgtctttctgtgtctagaagctgtaggtcaacattgtgtgtaattcccagtcattctcctccaccttatttttttgagagcacatctctcactgaaaatggaattcacatattctgctcggcaggctcaggcgacagcctgcctctgcttctctagctccaagatgtcaggcgcgtggcaggtagcgtgtccagctcttcctgtggatgccaggaatccagactcaggtccttgcgcttgtacttaactgagccatcttctccccggctctcacgtacggttggctgtgctgccttctctttgatgctcttctggctgcccactggagattgacatgagcttgaccctttgggcgtggctctgagcaatcagaaaaagcatagtaaaactcaggtgccagaattgctcttgctggcacagttggagcaaacgtgggtttgggggtgaggggagacattaagagggatgttccttgtgcaaaggacccgagttcatttcctaatgcccatcttcagggactcacaactggttatgactccagaaccaggggatctgatgcccaccatctaatgtccctccagggcaccagccatgccatggtacacggaaatacatgcaggcaaaatacaaaataataatgaaaataactttttaaatggtctttccagccaggcagtggtggcacatgcatttaatcccagtacttgggaggcagaggcgggcagatctctgagtttgaggccagcctggtctatagagtggattctgggacagccagggctacacagaaaaaccgtatcttgagaaaaaaaaaaaaacaaaacttttttttttctcattctctttttctctgagcttcatttcatatgagtaaattcaaatccgctctccctgtatagaccgcagagagagtatctttatcctgacagattgacaagcccctgggtagggtaggattgacttcctaccctggcctctgcctgagtctgctctcagatctacatgtgcttctcctggggccactggagcagagagccctggcttccctgcctgtgcacctttccctaaattgcagtcagcagtttagtgttgatcccaggagggatagaagggaggctcactcatgcccccaagtcccaagtgcatatttatctaagaatagatgacgacaagataagtctagccacgggttcaaatccaaagccctgagaaagcccataccttgatcaggcacatccttgttctgcccatggagtaaagagagaagacggagtgtgggaagcggtgcattatgggtatttcactcactatttaataaactcacctgtgccttttgtatctctatggtcttaccattcaacttccaccctcatgagtccgcctgcaccatttccacccatacctgccagaattttaatgaaatggactgtgatgagaagcaataattaccttgaaagactctggcgataatcacgctgattagcggctgaatggagtgcatgctactatcttattacccattatcatctcagtcataaatgtgatccaaaatctagtaaaaacgttgtcaggacgacttcacagcactatcttctcattaaagaagagactaggaagtgtttgtgtaaacctgcaagctgtggttccatcagaccagacacaatgggggagttgtcttaaatcgaggtgcatttacttcacgcgcaaactgatgggagttatttaggccttaattagcgctcgggagatggggccgtgccaaggcaaggttctgtttgtccaagaccataaatctggattgcagtcagtgcctagcactgcctggtccggctgaagaggggaggacattcctgtgacacctgctgcagtgccaacaggttaatgggggcagtctggccgccgcctccaccaccgcttcctcttccaaacaaagcaggcaccatgcaaagtagcggttctcagtcctggctgcacgctgggctcacctaacctagctagctagcttgttcgtttgatccaggctagctttggacttcatacacatgcaggctggcctcgctctcccctcagcctctcagctcctggggtcacaggtgtgtttcatcaaactgagatcacctaagaagttttttttttttaattgtttttacacttattttgtgtgtgtgtgtgtgtgtgtaagtaagtgtgtagtcagaggacagctagtaggagtcaccaatcttcatcatgcggtccccagggattagacatcaggctcagcagcaagtgacctttaattgctgggccatctcaccagccctctcctaagaagttctaactacttagtcccaaatgctttggtggcaggtatagactgttcaaacactcgctaacacagaggattacggaacctttcagaaagctgacttctccaaatgggcttaccccatggctgagcttcatctcttctcttggtggggtatatataggacatgccactgtcacccagcatggcagcctagcagtggtttttatgttgaaatccctcacaaaactcagcaatcctatgctgctgtccctacccaaaagaccaggatttcattggtcataggtggcacctaggtgtttggatttttaaccctaagtagatgtaagaggcaaaaaataaaaaatctcagcaccagcgattaagtgtataaaaattcaataagctaggctgtccaaaaggcctcagttctgcatactcatgaaagtggaaggttctccaaagggtctttgtggtctgggcagtggtagagtcctgtaagcctaaagaccaaagtttgtgtactgcttggttgtgtgtgtcaacctgacacaaactggagttatcacagagaaaggagcctcccttgaggaaatgcctccatgagatccaactgtaaggcatgttctcaattagtgagggagggcccagcccattgtgggtggtaccatctctgggctggtagtcctgggttctataagaaagcaagctgagcaagccaggggaagcaagccagtaagtaacatccctccatggcctctgcatcagctcctgtctctaagttcctgccctgtatgagttcctgtcctgacttcctttggtgatgaacagcagtgcggaagtgtaagctgaataaaccctttcctcaccaacttgcttcttggtcatgatgctttgttgtgtgcagaaatacaaaccctaagacagtttgcatccccagaaacacacctaaatgccaggtgggtataacagcctgcctgtaatctccacctcagaaagtggttatggagcctcagggcaagcaaacaaagctaactagactacccacatctagtaagaactaaccacattagagaactctgggttctaagggaccctgcaaggaccaaggtggaagggtattccaagatgatccggacattagcccttacacatgtgtgcacacacagatacaggtacactttcacactcaaaactgggggagcgtcttctttgtagatttccacttgtttatattttatcagccatatgtgtcaccaagggcatgattcctcccggaggtgagaaggagagagcctgtcattcttttccacgaaattgagctctctcacagagctgtccctgaagaaatattttcaatgtagagttttgagtctatattgtaatgaaagaatgcagagttgttccttatgagacgggcagatcaatccaccgctcacgtcccgtctcggaccataggcgttcccttggcccatcagagactgggtttcctgatcaagggttatgaaatcaatattgctggcaagtggaggattcctggagatgtgtttacaggaaagcacctcacacggcagaaggtgatgtgcacgtgttgggcgccactgtcagcgccacagtggccatacttgggttaatggtggtttcctgaggaaatgctgattgggtccagactgtccagcaagcactgttgatcaacagtttggaacattgttggttttttgctttcctataatccaagccaagatggtggcctaggctggaaaggtggccaggtatgaagccaggagagatggatatggtcttcaaaacacttactttctgttggaattgatacggtgggtgaggaagaggggaatgtggatgaccttgggggttcttgctttaacctttgacctttgacctgggtcagtgatagtgtcaccgttcttctggggggacattgggaagacagatcctgaggggagcgtggaaggatgtctgaggttcccctgagacctaggagagcttcagggttcctcctgtttgcagctccccagaactcaggttgcaatacatgtgcctagcttttacgtaatatactgagtcccagtctcactaagttgcccatgctggccttgaactgccaaacctcctgcctcagccacttacttcattagctgggattacaggcctacaccaccgggcatggcttaagactcatttcctttttagtttttatttatttatctttatacgtatcagtgttttcactacaggtatgtctgtgcactgtatgtacgaaatgcctgcaaaagccagaggagaggctacaatccctgagactggagtcatcaccgattttttttttttttaaagatttatttatttatttattatatgtaagtacattgtagctgtcttcagacactccagaagagggagtcagatctcgttacggatggttgtgagccaccatgtggttgctgggatttgaactctggaccttcggaagagcagtcgggtgctctaacccactgagccatctcaccagccctttttttttttttttagctactgtgaggatgctagacatcaaacctgggccctctggaagagcagtcaaagttctaaccactgagccacctcacctctccaaccacttaagattccttttcaatcactgaggtcattcttggtcatagggaatcgcaccatctcatttagttaactacaaatcttaccggagaagtcagctttcattcattgcaggggtgggaaggacacctttaggtaaatggcataaacagtttgaagctttgactgacctcagctgggactgccttggagatgaggccagagctcctctcagcctcggcctaattagcaaccctggaagtaaccagctgggagacagagaatttgttgtttcaggacagctgggtttatccagaactgaatctcacactggtgattgcaaagtttatttcattattgttatttgcaacatccagggggcaacacatggtaatttattaacacgttgtaaagtgtgctgaaattaatttgtgaagcaggaatgccagcgggatctacagtacccagatttctggtccccaaagatggtctgctccttcagtgggttctaactaaggattagaggagatgaaaaggcagctactttatttttagacatgatctctgatgtcttccatctttttaaccttagatttaaaaaaaaaaagaattatttatcttatactgtagctatatgctgcacaccataggtgtcttcagacacaccagaagaggccatcagaccccattacaggtggttgtgagccgccatgtggttgctgggaattgaactcaggacctctggaagagcagtcagtgctcttaactgctgagtcatctccccagccccttagccttagattttttttttttttttttttttttttgtagccaatcacctacaaaatctgaaaatttctctaataagccagtacatatcaaaacaaatacaagaaatgccttcattttcagtttgggagaattttttatccacgtgggtctgtgaagtctctgtccaaaagtatcattttgaggacaatagaaacatgagtcttatttgattccaagatgtggcctttcctatttatagtacagtttgcgatcttgaaactaaattttttttaaaggtgttgttctatttatttctttttttatgtgtggctggcatgtatgtatgtatgtgtaccatatgcatgcagtacccatggcaaccggaagagggcatacgattcctctggaattttttgtggatataacccaacaagtgtgtgctggaaactaaacctaggtcctctgcaagagccccctgtgctctgaactcctgggccgacgctctaaccccttcagagatggctatttaaaagaacaacagtaacaacaatggtcattcacacctgtcaccccagcaagcaggagtctgtggcaaccagcttgccttgagttcaaagccatataatggttacatagttctcagccaaccgaaactacagaatgaagccctatctcaaacaagtgaaagagcaaacagacatgagccaaacaaaggtatgtccagggtaaaggccagccctctgaaccagaggtgcagtcacaatgccaaccagaattattactcatccttactgcgcttcaagtagtgcttggttttcctttgacctgtgtcaaccatgttgtgatagatctgaaaagcccccgcctctgctggctgctaccagtttcataaaaacaagtaaccagccacgtagtctaagagagaaaggtgaggcatagctgggaaactgccaagtaggagggggatgtggtctggatgacaatgttacaatgttgccactatcacagcaggggggagccaacagccagagctaaaaacagagtctcatggggcagacatcctgccatttcagtttcgttcaaggaattccacccagattccgctgtcacctaaccagtcccaccaggcacagacttcacatcacacaatatgggaacatatacatatgacaatataaaaagacatggtatgccttccatcgtgacccactgaggggctacaccctcacttatgggtgagcctttccccagtgtttatcctgcattcaatcagggtgaattaaccagacaaatgcaccagaagtagcagctacaaaacaagagtccggaactattgggtttttgaaacagggactcactttgtagcccagctggcctaaaacttgtagcaatccttctaccttagcctcccaagtgctgggttacaagagtgcaccctcactcccagcttttgtagtctagacacccagcatgtagtaggtcatactcaaggaataggcagtgcttgtcctaaattgattataaaatcaaaatgggggggggggagtccaaaaaataggacaaattttgatcaaagaacaaaaatgggaattttcatctttctcttcgtgacacaaagaaagtagagccagctgttacataatacatcaggtttgatccttggagcttacagggtggaaggaaagacctgacccccatcagttatcctctgaccttcacgagtacactgcgtgcatgcatcatgctcatatgcacatgataaataacgtaattaaaatcttaaagtaacttaggaatggtttgcttatggattatttacatattatataaccaattttatttttaaaatatacagacagcagttttactgtggtggtcagcctggaatagtagcagaaggcaatctcagctggatcttgtatgtgggggtttacttaaatagcccaggttggcctcaaactcactgcatagcccaggctggatttgaattcatgcttttcctccctttgtcccccaagaagtaggactacagtgaagtaccatcatagactcatcttttgaattttggaaaaggtacccgatcaagtcttgttccatgagatatgacgtgcttgccctccaggcttctagaatccattcttagcctcatccactagatttgcaattgttttccaaatatttgtctattttttccccctcacaagagacctaattgctgtgggaaaaaccactgctcctcactttaaaaaaacaaagcttgactttcttgtttatttacctagatctttctgtttatgtttatggagccgtttttgggccttctgtggaaggattgatcatgacagatggtagccagcaacctttgggtcttgaagcattttggacgaggacactttaggagtctgccaaaagctagcagctggccagccccactaactagagtgatgtaccaagtttggcgaaatcattgcctagccttgggccaaacgggggcagaccagggctctgcagtgaagaattcatgagagtgtatcggccagagcatcccagatgacaaacgaggagacatagctcaggtcagaggactcaggagaggatccagtgcgatgactcatacccagtcaatggtggttctgccctttgacatcagtcatgggaacggctgcagagttaggctcttgcttgcagctttgtgaatggtgacagtgatgggggggggggggaacgatagctgttaagttgccccgtttaagcctgcagccccccattcttctcaccgtgctggggcatcctgagagacagttctcttgatttcacttcaccaagcaggaggacggtgtgtggtcactggtccaagtaccagaccctctgtatggtgacttcctgacaggaagaaaggcattatggcctcatatgctgttcttccttgggtctctcgtgcacttggaaaggaccctgtttggccccgccccctcatccctctgtcaatcaatccagtgctctacagtatagaggcaggagagtgaagggcgaagggtctggaattgtatcggtaggacttccaaccaagacaggccacgtagaagctgccttagacctgttcttcacttccttcatgtccttgtcacttggctggatggttctgactcctgaatctgttacagttgtagaacaagctaaccatgcagtgtgctcagtgtggactttagtgcacgtactaggtctataatgaagcctcaatatgtcatcagttctatatcactgtttttcatattttagcagccctgggataaaatgttagtggcaatagcatcttgtaattatgacagcaccttccttctttctggtccagtggtgctgtcttgggttccacacgagttcatcccacccacctgctctctgagaggctgttgaatgaccttggcaagtgcatcaattagttgctttttaatactctttttcttcttattcatttgctacatgtgtatagttatttatacgcttgtgtgtggcgtgctggtagcgatcactggacagctgtgggactgcgtcttctcttcttgaatacttgaatccgggtctcttgttatttgcaccggtgcactatacatgtgagcccctgggtgattctcctgtctcccattctcatctcactgtaggaacagtggggttacagacacaagctactacatctggctttttttttcaagtggattccataattgtcaatcttggatagcaagcagttttactaccaaggcatctcaccaacccatgaatctgtcacttttattttgtcactaatgaccgaatagaatacctgaccaaaaaaaaaaaaaaaaaaaaaaaacttaaagggaggggatttattttgcctcacagtttcagcagcctcgtgcacataggtgttatggcattgggagtgtttggaaaaagccgctgctgtgtcttccttgctaaataggaagcagagaggaaggaaggggctgggtcgcaggaaacttccttcacggaggtccagagccaacctctctgtcataaacacacattcaaggatgagccttggctggctttagcctttaaaagaaaaattggggggggggggcaaggttgaaggaaggcagctgaggtgatgggaggaagttaatgaatctaagcaatcgaaatcctgtcctatgtgcccatctgctcctggacttgtgcacatgctctgtgttgtttctccccccacccccactcccatggacttgtgcgaatgttctgtggtgtttgtttgtctgttttatccaggcaggtgtgagctgtggctcagtgaacctactactggatcttcagtttaagaactatgctatctgatagtaccaagttcttcagtcatatgtgctttttggttttttcggacattcactgtgtgcttgtgtgttcacaagcaggtgtgtattccactgcaccgtgtgcttatggaggactgacaactgtgggcaccagtgttttcattgtgtaagtcctggagatagaacttacatcttcaggcttggcagcaagctcctatactcattgagccatctggcctgccatctggtcatattcaaaccatctttctcaccctaatacctactgatggcccacttgcttattattttaacattgtgtttggatggatggatggatggatggatggatggatggatggatggatagatggatgggtggatggatgtccctgtgtgtgcgtacaggtacagacaacttggtgtgcctgtcctcactgtctaccttgttggagacagggtcactttgttcagggctgcctgtaccaggctacctagttcctaggtgtccattctcctgctgtggttgctagggatttgaactccagtcctcacgctttagtagcaagctcttttgtccaccaagccttctcactagccctaaagacctagttctagtccctcagccttcatagttagctgaccaaatataaagttcacggcatcgcctctaaaaatggttccatcctcttcccagcccctcatctcaagggtcaaaaatgcctttggaatatgcagcccattctgtagagttattttaattatcttaattatgctggccaagctattaataaatatgtgttggaaagcatcagctaaatgctccaatgggctggatgtgaggccgcatgcccgacatcttggcactcacgatgctgaagcatcctggagggtcaggagtttgaggccagcctggggtatggggcaagacactgtcttagggcaaaaaaaaaaaaaaagtgcataaattataaaatcaatattataaaattatataaaataaatacataagttagtaccatcacagaatagacacttgggtgacaaaaccaagtaaacggtacttggtgcggaaggattttgttatcattgatactgaactccaaagatctgtcctgggtttgttgctaagtcaacttccccttagttacaaggcagaactcaagtgaattaatgaaatgaaataggagggatacagagagccttcctcaggagtgaagggttgcagggaggtagatttttttctagtaacattattttgatgtataggggaaccctgcttgcagcacccagctaaatttactcagaaccatctggttctcttggaatagatgggataccagttgcacacatggcgtgcctttgttggggctttctataacagcaaacaatctcgccgtggctgggggcgtttctctgaggtagaacgtgctcagcaagtgttggtgctccctgctcatcaatgcgaattgccctttatagaaaggaactgagcaggcaagatggctcagctggcaaagacacttacaaggaacacaagcctgatggcctcggtttgactcccagaaatgagagaactaactcaaaacaatggtccccagaggtcacagtcacactgtggcatatgcaaacctgcctaccaacaacacagcagcaacaacaaaaacaacaataataataaatagttgtttttttaatttaagagaatcacaaatcagacattgtatcacataactgtaacctcagctctgggggaggtatgggagacaagaggatcagaagttcaaggctagccaggcggtggtggcgcacacctttaatcccagcacttgggaggcagaggcaggggggtttctgagttcaaggccagcctggtctcagagtgaggaggaggagggggggnnnnnnnnnnnnnnnnnnnnnnnnnnnnnnnnnnnnnnnnnnnnnnnnnnnnnnnnnnnnnnnnnnnnnnnnnnnnnnnnnnnnnnnnnnnnnnnnnnnnnnnnnnnnnnnnnnnnnnnnnnnnnnnnnnnnnnnnnnnnnnnnnnnnnnnnnnnnnnnnnnnnnnnnnnnnnnnnnnnnnnnnnnnnnnnnnnnnnnnnnnnnnnnnnnnnnnnnnnnnnnnnnnnnnnnnnnnnnnnnnnnnnnnnnnnnnnnnnnnnnnnnnnnnnnnnnnnnnnnnnnnnnnnnnnnnnnnnnnnnnnnnnnnnnnnnnnnnnnnnnnnnnnnnnnnnnnnnnnnnnnnnnnnnnnnnnnnnnnnnnnnnnnnnnnnnnnnnnnnnnnnnnnnnnnnnnnnnnnnnnnnnnnnnnnnnnnnnnnnnnnnnnnnnnnnnnnnnnnnnnnnnnnnnnnnnnnnnnnnnnnnnnnnnnnnnnnnnnnnnnnnnnnnnnnnnnnnnnnnnnnnnnnnnnnnnnnnnnnnnnnnnnnnnnnnnnnnnnnnnnnnnnnnnnnnnnnnnnnnnnnnnnnnnnnnnnnnnnnnnnnnnnnnnnnnnnnnnnnnnnnnnnnnnnnnnnnnnnnnnnnnnnnnnnnnnnnnnnnnnnnnnnnnnnnnnnnnnnnnnnnnnnnnnnnnnnnnnnnnnnnnnnnnnnnnnnnnnnnnnnnnnnnnnnnnnnnnnnnnnnnnnnnnnnnnnnnnnnnnnnnnnnnnnnnnnnnnnnnnnnnnnnnnnnnnnnnnnnnnnnnnnnnnnnnnnnnnnnnnnnnnnnnnnnnnnnnnnnnnnnnnnnnnnnnnnnnnnnnnnnnnnnnnnnnnnnnnnnnnnnnnnnnnnnnnnnnnnnnnnnnnnnnnnnnnnnnnnnnnnnnnnnnnnnnnnnnnnnnnnnnnnnnnnnnnnnnnnnnnnnnnnnnnnnnnnnnnnnnnnnnnnnnnnnnnnnnnnnnnnnnnnnnnnnnnnnnnnnnnnnnnnnnnnnnnnnnnnnnnnnnnnnnnnnnnnnnnnnnnnnnnnnnnnnnnnnnnnnnnnnnnnnnnnnnnnnnnnnnnnnnnnnnnnnnnnnnnnnnnnnnnnnnnnnnnnnnnnnnnnnnnnnnnnnnnnnnnnnnnnnnnnnnnnnnnnnnnnnnnnnnnnnnnnnnnnnnnnnnnnnnnnnnnnnnnnnnnnnnnnnnnnnnnnnnnnnnnnnnnnnnnnnnnnnnnnnnnnnnnnnnnnnnnnnnnnnnnnnnnnnnnnnnnnnnnnnnnnnnnnnnnnnnnnnnnnnnnnnnnnnnnnnnnnnnnnnnnnnnnnnnnnnnnnnnnnnnnnnnnnnnnnnnnnnnnnnnnnnnnnnnnnnnnnnnnnnnnnnnnnnnnnnnnnnnnnngatgcccaaggttgatctttggcctctttatgtgcatatatccatgtgcacacacaccccaataagcacacatacaatcaatattaaaatgaagcagtgtctgtcaaactgttaccacctaggggtcttgatcaggttcatctgtctctgctagttaaggaattaaaaggcaggaaaaaaccttctacacagatagcagtagagaaatctcaaatgctgcaaaagggagcaaacagaatgagcagttgaagaaaagcttttattgggagaacacccgcaggcacacagagaaagagaccctccgagaaccagaggagggattcaaatgtcaaaatccagtcttttctcaagggctggcagggtttaaagactctgaagatttctcattgaatctggcgctccatggtttgctagattggccagcaggccctcagggatcctcttagccccaccttgccagcagcggaattatgcgtgtctcctgtctgctagtcttggcttggttcacttgaagaaaggtaaggtggctgactggctcacaactgttgtataaacatatcctgacctggccttgagtccatctgcaggtgaccagctgatgggagagggagcccacagggcctttgtattaagctgccaggttttgtctcagatcaggagggtgaggaagaagctggccaccttggaaggtccccatctttattaccagcctttgttacttagtcctctattattatggcctttctccctatgtcccagggagtctggcccactcctagcccctcagagcataggcatagttggtccctctttggatttgtaaagctaaagagagcactgacctcagggtcaatcctttagagttaattgggttttttccacagttgagtagcaatagcacccaataaggaattttctcaatggcttaagagactgtggttggaaggtctgtgtccctgccctcccagaattctggttgaaatcctacctgagccctccaaaggcactagacatgatcaggtcttcagaatgaaactgagaagggtccctgcatttgtttgttaaaaacctcagaaattccttaccccttccaccaagggagatcacagcagaggatgccatcttgtgcaaatcagtctttaccagggcttcccagccgctgtaattgtgagagatgttccccctctcccccccccccattatgtacgagtcactccatttcagggaatttactacagctgcctaaacacacaaaggcaggagaggttgtgagttcaggctgaagtgctcacacagcaaatggcactaggaaccggtaggaaattggatccataagtccgcggctgagcgacagagggtgagccctcagaagtcacagggttacttttgaagctataggaatgaagaagatggatgagaaggagccgctctgaaaggtagagggagcaagggggtgtgtgaaagtcacagaccctgtgggcaccgacaacagcccagagttcagtgagcccagcgtttagggggtcctgagggatagggtcatgagtaacctttatgacaggaaggtgacagaggggagcagaagccagtttgcaatgaaccaaagaggaatttccaagtggcaggcgatgaaaggaaggggacagatcgggttggaaggggagagagagaagagagactcctctcccaggctttccttctgggtaaggaacacattcacattccggggcctcttctctgtcccaaacacacagcaatgatgaataaaaatgcccaaagagggctgggcagctcacttggtagagcatgcatggcagacacaaagctctgggctccataaactggagaaatgatagcctttacgtgtcacccccacacgcgggagtccaaggtgctagcctgggttacataacaaactcgaagccagcctgggctacatgagatcatgtctcaaaagcagaacaaaacaaaaatgctcagagactattcatatttggaacaggaagagctgaacgcattttttagaacttgaagaggcacaattgcgtatagatcaaagtttactttggacagtgatggtggccagcattacggagcacataagatccaggtgctagtctgtgtgtgtctcctgtgttaattccttagtacttgggtagccctgggagataagcatttaatattggactaaactggaaaagtgagatcagatctctcttgcccaaggtcacccagctaggagttgagactggaacaacctggctaccatctaatcgctgtctaactgctaaaaagatacatgaagataaatccatagctagacacagagtatcaaaataatatctttcaaagttcttaaagacgtcttaggaagaaaggcggctcatctggaagggagtgatacattgccttgatggtgtatctccttagttgtctggtgctataactgaagatcacagggtgggcaatttataaagaataaaggccaatctcgtttatagttcttaaggctaggttgtccccgggtgtgttgtatgatactgtgaggtcatggtgcctgctgggattcacacacacgcacatacacacacacacatacatgcacgaaattaaataaacaaagtgtgaaaaggtaaatcaagtggggcagggatgttgctcagtgagtagagtgcttgcccagcatacacaaaagctctgggttgatctcaggcactccatacaaccacacatacatctgggcacggtgatgctcaccacctctagtccagtactcagcggggagaggcagagaatcggaagttcaaggtcatcctcaactacatggagagtttgaggccagcttaggctacatgaaaccctgactacatacatacatacatacatacatgcatgcatactacacaaaccagccaggatacaagaaacaaatgtgagaccaggctttctgaacatctggccctccttgcctcttcctctccagtgcagcaaccctagcaatactggggaagggattcaaggctccatgcatgcttggctacgctatgacacaactgagctacgatcccaacccctggcattagcccttcatggtaaaatactaaagataaaggacccaacaggccagaatttggaggagccatctctggaagccagatagtgagtgttctccatgatagaccacatagagatagttgctcttccaggaagaggaaaaagtcagagggcagggtagatacaggggggaagggggacagaaaaccatttagcttgtgcacggtggcctctagcttcaggcatgtggggagaagtcatctagaggagaagaagccaggaaagaggttttaaggagcatggtgaaggtcaaaggtgagaaactgatgactgagaagaggctcacttggcagtctctgcagcctggcaatttggggcagctgtggttggtggtgccgccagcctgcttgactgtcctttccccagctgggctctgcatttctgcgtaggagcacaggaaatgttctcaagttagcccaggagttgtttgcagggtgtgggaaatggagtaggccaaggtcagaatgagcctgcagcccagcccgagtctcttggggaccggagggttcagggaggtgacaggaaaggtatcctgggattgaccttgaagttggacttggaagggaagtaaacaatgtctgggcctcaggagggggttgtagcgctaggggagataggggagcacgtgaacaaggtcagctgacgtgagagaaagcaaaggtcgagggaggagaaggctggcctgtgtcaatggtggatggtccagtcccttcctcagtaaggtcccactaacagaccaaagtaatccccctgcacagccaaggagtactggctgctttcatatcagagtgtgggtgaggggtttcctatagttgtatgggtgaccccaaagcagccacactggatgcactttctggtgtggatggatcatggcttcccatagctgtataagattaatgtcccctaggccatatgcaattagggcagaatcatatacacattgctggaagaagtgcctggaatctcacgtgagggtccagtgacctcctcacccacctccttaatggaatgcccagtcccaaagcatgactgtgatggattcttacaagcaggcacaactgattggataagaatggtggctcttctgctcagagggtagcgcctcacagtggttaagggtcagagtggtccatagatagcaccagcagggacagagggcaagaaagcagagggtagattgctgagggctgtcgtgacatgctatcagtgacaggtgactcttataatgtgcttttaggttgttggatttgtttgtttgtgtgtgtgtgtgtttgaggagggggtcccttctctttcataataccattgtattttaatcacagggacccaaagaatctttgtaattgttttctggattggtgatttcaaatgtacaacttcttcaacatcaaacccttgcagactctagcctcccccctccaccacagcctgttcatgcatttggacaatctgagcagtagtcccagaactcagtagtcctcaaagtccaacgtcatagccgttggcttacctgggagatggtgacagggccccacctaatggcccttctgtaaagtgcaaagggagctagcaggctcaagagaggggaaagtgctccagccatcacaaaggagggagtgacttcctccaggatacaggggcaagaatgaggcggcggaggagatgatggttcatgtcaaagatgataatagcatcagtgtcggcagagaggcagagattcctactggacaggaccgagcttcctgctccctggctaaaccacatccccgaccctgctcctccgtttttaaccccctggtccaaggtttacatcttcgttgtgaggaaagggaaatctgtctttcccatcttacagaaccagtttttgggttttttggttatgttttgttttgtttgtttgttgtttttaataataggttttttttttttcctccttgcaagttttccaaggctgcaagaattccttaaaagactcacactgacaatcacatggcctcttgcttttcagtaacgatcactagggattctccgaggtttcgtgtccctcgagggaatgcttgtccactgcatcttcagaacaatggctttgcagctgtgtcttaggcttttctacatcttcaggcatgaatgagggacatgggtaggtcatcttaaatctggctcagggcagacttttaaagtgagaaaaggctgcggttgatatgtgaggtgtgagtccctcaagggcacagatgctgccatctgatccccctgcaagggattaagagggtggtgacatccagctttgatatttagaggtagacttttgagaggtccttaggaatagactaagtcttcagtgtgggtccctgtgattaaaatacaatggtattatgaaagagaaggaccccccccccccaaacacacacacacacacaccctgcctcttgccatgtagcacttcctgtactacctgcctctgtagaattcctgccagtaagagactgaagctgccataggcatctctagagagtcacaagccagaatcaacatgcctgtacacacacagacacacttgaaaacagagaaggcgaagtccaaaagtcctctgatcaaagtatcacctctctctctctctctctctctctctgtgtgtgtgtgtgtgtctctgtgtgtgtgtctgtgtctgtgcactcgcacatgcatgccatagaggcttctgtataggacggctcgtcttcatttcttcataagctttctttcctagcttgcaggtatttcattatagtaacacagaacaggctaagccagaaggagcagctaatacatggcctggggtggggggtggagagagagtgaaaaaaaaaaaagagaatctgggtgggaatgccacagtaggaaagaaagtctggccccagagacccaacggcaaaggaaataagttaaaaataaaataaagccggggataaacctaagagctccttggcgggatcaaagctgagtggaagactctgttcctagagccccatgtccgagcaatttatttttcctaacctctcggtccccacgtgcctcgccagccgagatcaagtgacaaaggacatctcaaaatacccacagcaaaaaccactcagcatatctcccaggtggagaaagatgaccgttttgagagtcttcctcgagaatcactgatagattttccagcgtccagccaagtccttgggcacttgtcacctgccagctggccactgccttccagccttggactagatctctctcctgactagaggccccccactggatgcttgtggctttctctggttttgcatcttcctcctggaaccctcccgaccttttgttaatgaagatcttagcgagggggaaattgcattagtggctcataatcttgggtcagggctctaaattgtgttagttggtaagtaagggtaacattggaagtctgtgtttgtggtgagctattcccgaggaccgtaatggacagtaaaataataaagaatgggcaggaagacggctcttaaaaccagatttgccacgcaggtggtaccagacagggcaaggcttctgcactgtatcaggatggaagaagcagagctcttggtaggtcccagcgatacagaatgatgcctgatactttcagtaccctacatatcatctcagttaacattcatagcaacgtataagcgaaggctcgctgtggatgctctcgttgcttttaagagatgtgtgtccacatatatgtgtatatgtatatatgtgtgcgtgtatatatatatatatatatatatatatatatacacacactcctggctcagcaaggggtggtggagtacttcccccaacaccacacacacacacacacacacacacacacacacacacacacacacacacacatatgcacacaggcacacacatataccttgtccaaggctgaacagctaataattgacagaactggttgccacagccttttttgttggttttatatcctttatatatacaaccctatctatccagaagcagatattgtgactggaatagaccttggaggctaatctcagagagattcctgccctgaaacggaatgactgggtgtaagggactgtgggcagtgagtaacaaatgaaggggttactcaaaagttgagttgcaggctagagagatgactcagtagttaagagcactggctgctctttgaaggtcctgagttcaaatcccagcaaccacatggtggctcacaatcatcacgctctccacaaattcgctctgtgccgtcgatcttgttcctgttgagatgggtgactggtttttgttttgtcgttgctgcagtagtggtgttagggattgagcctggaacctgggacatgtgggcacccgttctaccactgaaatacatccctgaagtctttcctaagacattttattgattggttggttggttggttggttggttggttggttggttggttgattggctagctgtctgtctgtctggttggttggttactttaattaattggggagtatcttacatcacatgtgtggtggtctgaggacaacttgcaggaagcagttctttccttccaccccatgggtcctagggattgaactcaggtcatcagaccttgcgacgacaagcacctttatcctctgagccgtttcactgaccctatttattggtgtttgagacagggtctctagccctgccttggctcagactctctgtgtaggcaaggatggctctggacttctgatcctcctgcctccgcctcacgggtgcattttaggcatgtgccaacacacccagccttgtgcagtggtgggggaccgtgcgtgttaggtgagcaccctacccactgagtcacatccctaacccatccaaagaccccgtaaggagcctcatctatctaattcagcggggtaggggagtttggcagtgcaggctggagcccaccctggaagagaagtgttgctaaggttcctttgcccagaagactatctccatgtctgagagatttttaaagccgagcttcataatagaaacaccgccgcaacctgctatcagcaagagtgatattaaactggcccagagccaagcgcatggcattgagccagcagggagagattagtattggaagtaagattgtaggctcagggccaggggagggtggtgtgcccccacccccaccccaacacacgcttttcattaaaaaataataatcaaaaggatgagcagagtcacagaagaattcttgctgagcacatcttaccactccaccaggtcatgctcctgagatatctacagaggcgtgtgcaagctgaccactgcctgtctggaaacttggccgtgcatggcttaaccttaaaacggtctccataagaacccttctggtctgccccaacactgccattcttgactggcctgtttgacagagaaggacacaagaaaataatatccagcaaaacccattcccactgaagtgggagaccgtacatgaagccaaactgacttccagggaggcccacgcgtggggtgtagactgtggcatctcttccctgtgttggtccatcattttagcactcagtaagacctgtgaaaagccatgctttgtgtgtgtgtgtgtgtgtgtgtgtgagtgtgtgtgtgcgcgcgcgcacacatgcacagcaaaacatgtatggagatcagaagtcagcatcatgtgtctctttttaatatttatttattttatgtatacaagtacactgtagctgtcttcagacacaccagaagagggcatcagatctcattacagatggttgtgagccaccgtgtggtttctgggaattgaactcaggacctctggaagagcagtcagagcccttaaccgctgagccacctctccagcacatcatatgtcttcctaagccactttctatgttatactttggggtttatttatttatttatttatttatattttatgttttgcctgcatgtatatatgtgcaccgtgtccatacagtacctgaagaggccaaaagagggtatctcagaccccctggatatggagttacaaactgttgtgagctgcctcatgggtgctgggagtaaaaaccagatactctggtagagtgtggctcctgaccactgagccaccttcccagctccattgtggtgaccccccaaccctaaaatttattttcctagctactccataactgtaattttgctactgctattaatcataatctgatacgtgattcctgtgggggtcacaacccagaggttgagaaccaatgctctaactgaacctgacactccctgattggctagtgttagctggccagtggctctagggacccccttgtacgctacccacctgtgctggattgccgacacacgttgctgtggtgaggatttgaatttgggtcctcatgcctacagagcaaatcttttgcacactgtgccaattcatcatcccaagactctaccttcctcacagtccagttgctcagccaaggtacctctgagcgcaggggaggggccaactctgagttctgttgtgcagtggagaggagatggatatcccatgaccctcagatcccgctcgctattccaggagcacagcaatgactggcagtaccaggcgtccctggtctaaacatttctcagactggatgaatgtgcccagaagacctgctttcgccaaaccagtataaaataaactgtgtcgagcctctctagccctcatgcctgccagcattatggccattttggagcctctagttgttagagctttctttcctggtcacgttgtctctgtctctgtaaatatttacatatcacttttttcttagaactcactgaaagtaagttgcagggacagtgacccttcacccttgactacgtcagtgcgtgtgtcccaggaacaaggactttcttttatgtaaccgcagtgcaatgattaaaaacctggaagttgccagggagtagtggcgcacgcctttaatcccagcatttgggaggcagaggcaggcagatttctgagttcgaggccagcctggtctacagagtgagttccaggacagccaaggctacacagagaaaccctgtctcaaaaaacaaaacaaaacaaaacaaaacaacccaggaagttgaacggtgttacaacagtacactctggtacacaggcgtatttacattttgccaattggtttggtcttgtttattggggccagagtttcatgtagcccaggccggccttttaattctacgtagctgaggccagccttgaacacctgacccttctgccatcatgctccaagtgcaagcatgacaggtccacaccaccatgccccatattcccgtaacccccttcactattggtcctctgatccaggacctcatgttacttctagtggtgacttccgtgtacctggagaagtttttctgtgtttcatgcattttcggactgtcacttattctcttgttttcctcactgtgtcttatactccactgtgcctcttccacgggagttcagtagcggtactatgtggtctttttgcattctcctaaccatgctgtgtcctcttgtctgtcatttcagaagactgatctccttcatttatttatttttttaatttgatatgtatttatatatttaaaaaattttttttcatgaggtgtttggtactggggccagtgggaggggtcattgtcagcagggcctccagatgttgttacaaagttaccctgaggtagaacaggagcagtcctgaaggcctgctgatcccaggcctctggctcctgcaaagtggggatagagccttcatggagtggttacattagatgtgctaagctcttacaagttggctcctgagagtgaacactagggagactgaggcatgaagagcatctgagcccatgagttttagacttgcctaagaaatttagtgcgatccatttaaagatgatagtaataaagcaaccaggagcagggttgggggaatgtcgctccgtccatagaatgtttgcccaacataaatgaagccctgggtccatcccacgttctgcataaactaggtgtggtggtatccatggataatcccagcatccacatgggaggaggagagttgaagtttaggactatccactactacacaataagtttaaggctagcctgggctacatgagatttggggtgaatgggggagaaagaaaagagagagaggagaaaaacaaaaacccttaaaatcagaatggatgtagatctgatcacacaacaaaacagtttgccttttgtctttaattcatgtatgccctttggatggtctaacctcttaaacagtgcttctgttctgggctgatgaggtaactcacgggtatccttacctcagtttgatcctcagccccatagtgtggagggggaggggcgtgcatcccgcctctccatttggacaatcagggccctagtaaaggccttaatccttttcagaggagtctctcaatccacctcttcccaaagagcggtaaggagtccggcacacgacaggtctgacaatctcacatcagaggaattcaagtcatccctcggactgtggtcccttgctcctgggacatgactctcaaactactgtctccattcacaagattcagccttaaaaatcaatttgaagttatttcctccccacccctgccaatccccagtattcataaataatgaacttcattgggaaagcttggtctaaattctactttttttctcacgtcaatttttttcccaaactttgacatctgctactacttgttggctggatcacaagatgtcacctgctagcagacaaaaaaagattcaactaccaacaaacatgctaatttaaaactcagggtctgaatgcagaatttgggcctacgagatggctcagcagaaggaaaaggtccttgctgccaggtctgatgacctgagttcaatccccaaagcctatctagtagaaggagcaagccaatctctaaaggttattctctgacctccacacaaatgtccttgacaggtgcacgtgcacaaactgtaaataaataaataaataaatacccttggttcagagaataaaacatacaacaggtcagttcaacaatagctagctctctctctctctctctctctctctctatctgtctatctatctatatatatatatacaatttatctttttttcatctgttgttgttgttgttattgttgttgagacaaggtccatgagggactgatcaagtgtcagtggtggtgctcaactttaatcccagtaccagggaggcagaagcaagcagatctcttagtttgaggccagcctggtctacagagtgagttccaggacagacaggactacacagagaaaccctgtcttgaaaaacccccaaaaaataaaaatgaaagaaaagtctgaggcactgaaggatgcagagatggctgaggcctgagtttctagcacccctaatagtattggggtacttaatggaactttagtgatgactgctaattagtgggacccattttcagacttgcagaattcagcagaatgaaaggtatgttgtcacctgttgagcatatctcgtccccatgttcagaagacagctgtccaaacctgtcactgaaacatttaccctggttacacgggttaggagaccaccgttcttcacaaggaaatcagaacgggcaagctccgactgtggctcagtggtcctgaggttagccagggtgtgtgaggcccaatctgcagtgccatttttgaaaaactaataagcacagaagggcttgagaaagcttcttaccagttaagaatatctaccgctcttctagagtgcccaggtttggtttccagcacccacatcaggtgtcttacaactacttgtaattccagttccagggtatctgatgccctctgctggccactgtgggcattgaactcatgtgctcacaaacacataaccaaaattaaaaccttcctacaaattgttttaaattaaagtaaaattaaaaatctcaatgaagccgtcgcatcttgaccttattcccaaaacttaagaatcaatagattctttttcaacctctcttggagtgctagtgatatgtgacctccaaatttagcgaaagtaacaccagccaagacaaaaaccaccgagtagaggcaatgtctccttcccaattccatcaattagtgcctatgggagcgcaaggattcagttataaccaaatgtcaccccaattcatgattacataatgttcttttactaaaatgcctcctaagagtcactgtgatcttgagagatgccaggcagatctgaagtgggaggggtctcagggcaaaggaggaacaggagccaggacatagaggctgaaacagagagcacagtatggggaggaggcgagagactctgagaagcaaggagaacctgggcagaactgggaggagggtgagaaagactttgaggacctggaatttgatgggtggaggcaggcactcctggtctgtaatcttgagtctggtgggggctgcaaagctccttcacatctgtgatccccaggtcttgacagcatagaggacactgccagacactggaatggctggaaggacttcctagggtcccctgtcttctaatacatgggttcagaattagaaccagatattttcattcctgggctctaatctttctaccataagttgatatgttccagtggcactgaaaaaactggcttagtgtattgggaagaaaattaatgggcaagtgggtggatggatggatggatagatggatgggtggatggataagtagatggatggatgggtggttggatggatggatgagtagatggatggatgggtgggtgggtggatggatggatggatggatggatgagcatggattatcaggaaagaggaggcccatgattgtcatatcagaaattagaggacctgtcatggagatggatggtgagatagagatgctatggaatacatacagcttagtgcctagcatgctgggagaaggagaagtatagctcatgagataacacccaaggtttcccaccttggataattgaaagacggcagagagatccaggcttaaatcttagaggattcggggtaggggacatgacgtggtgaatgtagatctaaatatattcatttcagcccatccagagatgggcatgggcatagatctgggcttcaggaaaagtgtctgaggcacccaaaaggcttactgtgtcattagcaatcacacattaatgttgttatagatgttcactgtagtagtgtgagcatgcagaattatcataggattggaatcaatggtgggacacttgcctagcatttatggggccccaagttttatcccagcatcagaaaggaaggggggagagagggaagtgggggagagagagagagagagagagagagagagagagagaggacactacactactttttcttaaaaacaagatttttctagtccactggaaagagaagcagggtgggtccggcacttaaagatgacgttccatccaaatgctaattgcaagagtggactgggagagtcagtgaggcagtgggtggtgcctcccctctgaggaaaaccaataggaacagatccagccgcgagcctccagactcaccatatcatgcccttggcctgagccccagccacaagctggaccaagcctattttcccttgtcttggttggagagctttatttatttgtttgtttgtttaattatttatttatttattatatgtaagtacactgtagctgtcttatttatttatttatttatttattatatgtaagtacactgtagctgtcttcagacactggagtcagatctcattacaaatggttgtgagccaccatgtggtttctgggacttgaactcaggaccttaggaagagcagtcggtgctcttaaccactgagccatctcaccagccctggggagctcttttaagaggcttctacaactgtctctggtgggggcaaaagaagctctgccagggttctgtgcatggttctcgactttgtctctcagggagtttacaacccatccacacagaagagggaaaaaaatcaaacaaaacacaaactaccaggaaaatgtataaccgtctgttccttggttgttttttcctgacagtagatgcaatctcttaggagtcttaagcggttttgggcgggtgcccgatgcattgttttgcccggagaggcttggtaggaatgagctggatggagacgcaggccctgaagcacctcacgatagtcattcggtggatggcagaagggaaactctctagcctccagcgagccaggctgcagacctcctccctttgcccacttatacatggcgaccccagccaggtcccggcaagccttctcccccaccccacccccaccctgtccccgtactttattctcttccctcaaggctgagttagtcaaaaagctcatacgcctaattattctgcggcagaaactctgcctctgtgcaaagcactcattgtgtgagctcaaaaaaaaaaaaaaaaaaagttgaaggactcaggagaccaaagtcacctccaggagagacaccaaaccgcgaggctggtgaaggccaggcaaatgtgggcctggcagcagtttcaggttcgatatcaatttgtcaacttgagagaaaaaccagccgttcccgctcccagagaccaccttgtgaactgaaataagaaagaactgggagaaattggagctattttaagctcagcttctgagatttatttttggacccattattgatcttactgcggggaaaccatacagccgtccctgcgccaatatccacacctgcccgcgggaggtgcccgccccatctcctgggcccctctgtgtccaaaggaggccgtggctcacccagggagaggcctcgctcctgggctgccatctgcatcaaaattagaacaagttctgaatggaaccttgttacagccgcccttggaacctaaacttacaagtatgttttttgggtttttggggtgcttttttccccctacctttgaaaacgtttttagttaatgaacccagctgtagcgtttgcgaccctgctgtactgaatgtctctgcctcacccataattagttgtcatggcctggagcacctgattaggatgttggcagtggtgttgctacacacacacacacacacacacacacacacacacacacacacaccccacacacacaccctactcccattccccatcccccaaaacagtcttttccacattggtcgctgtattgattcttcaccacatagcctcactcacaggagcctggggatccccaggtcacctgggggtgggggaccttgaggcatggcttgaaatagttaactaccctcctcctatcttgcacaagtccctttaaggcttgaacacaggattcgaagtgttgcttccctcaaaggtatcgatcgaggctgcccctgccttatcactttacccagcatcctttgctctttggtcttcttgtccccattctacccgggcttcactggtgagctttgtgttgaacctcactgacctcagtcagagccatgaccctgagttattcccgcctctccatctctcatgcgaattgtgttccccaggcctctgtttgtcattataaaaatctgtgacctttgaggtaggcagagagtggaaagcacccgtgtaccttggggcctcccagaaggtcacgtttggtcactgagaacaaagccacatgttcagggtggtgagcatcgtcatggcctggataatgaaggaaaggatcttgtgagtggaggattgtgggagtttcctagcctgccatacaaatgtctccagtcaggaggcagcacacaatacaagtgttctgacctcactatgctagaggtcggaggttgacctcaaggtgttcatggtaccatggtcctccaaaggccctctcaagcatccttcttcacctctctccagcatctaatggcaccagacatttcttggcttgtggctccatcactccagtctccgtaccaaccgctcattactgtcattgtatctgcatcccttcttatagggatgcccagcatcagatttcaggaccatcttctacctggaattccatcctaagatctttaactaattactgtatgactgtactgaaagttcctgtgtgcaagtaaggtctttcccgagcttcctgatagatgtgagttaaggagggagcctacagttcaggaagcagactcctgtttttcaactttgtttggaaactggtgttcctgcaaaaacctgtccacagacactttcagttcacaactctctcttgaaatggatgaacatcgctcgcacgatgggaaacagtttagtgctaggaaggcgtgaactttgagagccgggaccacagagaagggtcaggaggaggcggtgctaagtctgtctccaacgttctcagaggttccgttccctgtctgaggcttctgtcttccgtggagtgctaagagccacacatggggttcttgccagtggtaggcaatcacggtaccaagttcctgtctgagactcttacagagcccaaacaagatgtgtctgtggtttccagagccggagtggaccgaggatatgctgtgagtctgtctgagagtgatgggtcaattctacattttaactgttgtggagatgacaagacccccatctaatcatgcttgaaatacatgtacacacacaccccaaccctggaaaaataccactgtaaaactcagggctggagaactgactcagtaactcataattcagaggaccagagaattcccacaacccatgtcaggctgccttcttccagcctccaagggcatttgcctcacatgcacacacccacagacagacacatatgcctgtgatttttaaaattattcaaaacaaatctctgaaacggttatctggaacaaaaataaataaatacaaaacaaaggctacgatagtctactagaaatgtgggactgtcgtttgtgtttataaacaacaagatggtactggatcttctatatacagttggcttgttgttgtttgcctagtctttttggtttggtttcttttgtttgagacaagatctcctgtcacccaggctggcctcaaactccttaagtagcagagaatgacctggaacttccgatcttcctgactgtagctcccagtgcggggatcacagaccatggtgccgggtttttggagctgaaacttgggaattcatgcacactagccaatttctaaatgtttatttgtcctgcgctcaacaaaccaaagggctaagacacctatatgcttttggatgcctgctaatctcttatctcttcctcatgcttggagagagagagagagagagagagagagagagagacagacagacagacagacagacagagagagacagagacagagagagagagacagagagagagagagcctcagaaatacttttagcggccaattaaggaagagaatagcactggaaggtgtatggtctcctccagggaaggttaggctcagcatctccagactccactgtgagactgagtgtactcaaactgatccccagccgtggcagtcacctgtcatccccagacttaagaggcagtatctcggggaagatcatgaattcagggcccagcctaaactgttaggaggactctgtcttggggcagggaggggaattagtgtaaagggttgtgatgtcattcagtgatagagcgcctgcctgcctggtcctggattccagcagcagctcctgtgccaaagttctcctaagctccatctcgcagccgatcttggcagagagttctattttagctagctaaaaatgataccgaaaatggttctttagtgactactatcagagtcaggccaggaggctagaaggatggctcagtggttaagagtcagtcttccactagcagcctttggataaagacatagaactctcagctcctcctgtaccatgcctgcctggatactgccatattctcaccttgatgataatggactaaacttctgaacctgtaagccagcccaattaaatgttgtttttataagacttgccttggtcatggtgtctgttcacagcagtaaaaccctaactaagacagaaattggtcttctgggagacccaggttcaatccccagcacccacatggcagctcgtaactgtctgtgactcaagttccaggggatctggcaccaatgcacataaaataaaattaagtttaatatatatatgtatacatatatatatgtatgtatatgtgtgtgtatacatatacatatacatcatgaaaaggatcaggccagcctcccaaccatatacttcactttgaatctgctccctgtggtggttcaagatgtcagggttcttttctattgctccttgacttcccaagccccttaccagcctttagagtccttgctccaggctcagcatccctgttgggaaccctgccagcaggccactcagaggacaaccatcttgttccccttgacatttcctatctgccttgtgctatatcatcccaccacagactcctggcccacaggagtgggggatcgctacatcccatcccatccctacctcctaacccagcagagcctttcccacgaaccctaacccgcagcaggctgctcaggcctggttccacatggattctcttacctgcaggagtgtccttcagcactcgctggatggttctcccatcccccacactcctcctccttccctggtcccatagctgcgacaccctagcagtgtagtctagtcccaaggacagatttcagggagccggctctttaaagtccctccttcctcctgtggtgcttccacaaggctgcgggctgctagggtttgtgtttagcagactttgtgacatcctgggtttggtccctcggtttccccccaaaaccaaaccccaagtgggtaaagcaagaaaaaaacttttcttatgtttcatacatactggtgttgataacgattttgttgagtttttaatgtttgccacacagtgaaatgataaatatttcaggcaacgattagattacgtccaaatgtaattagacattgtatacatatattaagatgctatgttgagcttcatgcattttcaattaaaattattattctaaaaagaaaatcacactgggtgtgagcccagaagtaaaacattttcccagcatgcaaaggccctgtgtttacacctatataggtagcattatttatttgtatataacaatacgtagtaaacattttaaaactgataaggtaaaggtaaaggatttacatgacttgaagagaaaacggagtattaaacgtttaaatgttaacaaagggctgggcacataggcgggatggcgagtgtttgtctagatgcatgttctgggctgagctctaccccagtccctatacaaaccaggcgtcacggtacaagcttgcagggctatcccttgggaggatcaaagttgttctcagccacatacatagtaatttcaaagccaccctgggttccatgagaccatgggtttagagaaataacagcaacagaaacaggaaggtccctcaaacctaataccctgaagaggagtcaggctgtccctgaagccgagcacagcgtaaggacagcagaggcaacggcctggcaggacctcgtaggttcaccactccactttcaattccctcagagcatctggaaactggggccagggggccgggggtggggaggaattgaacccctggccttcaggatgctttaccaccaccacccccaagtggcattggaaaactgttcccttttgcctgaccaaaggcctaatgatgctgtccaacagaggagacctctccagagagacgctgccgtttacccagcgtcccagtcaatccacccagccttaatacccctaaagcccggggcaagcgcaaagtttgatgaggattaaataaaagcagcttgcctcccactgcactgccagatggggctctgattctgctccaagaccaaggtcggctcaagaatgagtctggggccatctctgcccccagggctgtgagcgccagcagtcagttctgtaggcactccaccttagagattgtgggttagaccctggagtctcagggccacttcatgcagcttactgtgggataggcttcttctttcctcctgccacaagataggcaaactctcggcctggtttgagcacccaagttggaggctcggccaccggtaactctagctctgggtcacctgaagcccccaccaccaccacctcagcagcactcacacactcgcacatcctctcacatagacacaacacagaaacgtcactttttaaaatgggggtggtgagacccatcccatgggtgggcaccgatccctgacactattaatgatactaagttctgcttgcagacaggaacctagcatggctgtcctctgaaaggctccacccagtagctgactcagatagatgcagacacccacagccagacagtggatggagcttggggactcttatggaagaatagagggaagaattgcagcctgcaaggggataggaactccacaggaagaccaacagtgtcaactaacctggacccttggggctcttagagtctgagccaccaaaccaagaagcataaacaggctggacctaggcctccccacataggtaatagaagtacagtttggtcttcatgtgggtcctgaacaatgggagcagagctatcccaaaagctgttgcctgtctgtgggatatgttcttctagctgggttgccttctctggcctcactgagagaggatgtgcctagccccaaagaaacttgatgtgtcatggtggggggatacccaggaggggggcagtaaattgtattaggtatttctgggtggtggtggtggtagtggtacacacttttaatcctagcattcgggaggcagtggcaggcagacctctttgaattcaaggccagcccgttcttcattgtgagttccagggctacagggagaaaccttgtattgaaaaagcgaatacaaaacaaacaaaaagaatgtaggagtgatgcgtttttgtggaaagacatagatttatgaagatgctgtatcctttatgaggagctgaggtatctttgaggcttggcatttaaggatagctgcaatttgatagcgtatggatcatgtgatcctctagtgtgttgtttgactgagtcttgttttaaatctagtcctcacaaaatgccaagacccctaaaaccttattttccacccctgagaggcccagtgtggaacacacatagtagggatataataaacatttaccaacccaccgaaggattgtctagaccagattgacctgtgagtgggtcggtggtgggttattgtacggtcttaactcatacagaaagacccaggctgaaagtgggcagcgccatgtcccggtgtggggccctggagcatgcagaatagggaaggctagctgagcacgaagcgcgcatgcgttccctctgtccctgcccgcgcatgtgatgtgaggagctgcctcgggctcctgataccctgacttctccgcagtagcgggttataaattgcagagatggactgtaaattggaattatgagctaaaataaacccctctctccccgaagttgcttatcatcaggatattttataccagtgacaggagtaaggcgaagacaggagcggagaggcagcagtaaagcagcattatgctttagcgtccctcctcactgccctttctcggtatgtcttaattaatcacatcccagatgctgaacagtggcttggctgggcctctgtgtcctttcaattgtatctaaagcataaagtgaaatgtccggtaggtctttctcaaaatccctaccaatccgccatctctgtactgcctccgctcatagcctcaacatacgacaggaaattacaaacaaacaaaaagcaggtgggaatgatttatttcgtggaaagatgtaggtttaggtagatactgtgtgccgtttatgtgaggagccgaaatatcttcttttgaggtttggtatcaaagaatagctgacccccttttttttctacctacacctcaattttaaacataatacaatttattttttagaatacttttatgtttacagagagattgcatgacagtacaaagacttctcatctatgcttaggaaagtttctcctttggggagtagagattaatctcactgtttctcatgcatgctaacattaaggtacaccctacacacacacacacacacacacacacacacacacacacacacagagcctttgagtttggaccttaaaccatagaagttgctaataccaagaatggaacccatgcatctggatttctgcactgcttccattaggctgcaaaccccatgccaaaaaaaaaaaaaaaaaaaaaatcataaaatttggaaatgaaacaagagaatacaaaactctgggaagacggtccttttccaggagaaagccagactgctgggaacggcacacattctgtttacggacagacagccacagaaagtaagccagagcacactccagtcaggactgtgtgacagaaaggagctgaccacacagaaccatcctcactcccttggctgtgcctccacagtgaagtatgcaaacctgctccctccatttctaactttcctcccttgccgttacagtgttgagaatctttgtatataaatcttttcagcttcattagacaaaattctcaagcatgcatttcctaaagtggttgtgtgtgtgtgtgtgtgtgtgtgtgtgtgtgtgttcacacgtgtgtatgtgcgtacatgttgatgtgtataacagacatgcgtgcaggtgttcatgcacatggagggatatctttcttatctgttctctgactcactctttagatttattgactacatagaggcttctcgtaaaaccttaaacgctagagcatagcatactgttccttggaaacgttggctcgctaatgtctcacacctgaaaatgttgccctcacttgagttcctgagttcaggcactagaatcctacccagaagtattgactgcagagccaaagtcatgcggacttccgcacacttggtatttcaggggctttggcacaaactaagcatcttgttattaaaagagactggagattggacaaagctagctcctgatagaacacctgagctactgagccaggcattagtgaacactccacggtggccagaacatatattttatgagtagtcagactccagggtcatcttcctagaaggaaacaagaagtactttgggctagcgctggtcttctcagagggcagtgaaaaatgagtcttccctcatggggagcctaatgggagatctgggagccatgccctgcactctcaattttgttgctgactgactctatgaccttacagttttgaacctcaattttcctcttctgaaaattgggaatatataatagaagttttattcatgcctcctccccctaggtttacagtgtgttcatttccttcgtctatagtgcgttctttattctgccttttattttgggaacagccttggtaatttttccagggcaggaatgcagccctcaccatccctgtatttctccaagccagacccagcacttgaatgcagtgagtatcagctagggcccaagcagaaggcagagatcacagttatttgaacaggaggaacttaatatcaggagttactaatgtctgatagaggcagctaccaagatagggcaagagcataaaggttactgtagagctgagagtgcccaaggaaggagggacgtttaaaggacccgttctccatggctgaggtgtcagatgcggacatctctggagaaggtgtggctgtctcacacacacacacacacacacacacacacacacacagacacacacacacacacccaggatggcaaaggagttccttaggctccctaaaccacagctaggtgccagttactgaacaccacgaagtcttctgggacacaggcaaggtgaggttagaggccaggtgtgccaagggagttggcgcgcactaccaccagtgcgaagctagaatgcacatggagcctgcatcaggagggccagagcgaagtggttcctgggcccactgccaggactgcaaggtcattgagtaacgaccctccaggcacgcagcaaggcagaacaacatcctttcccacagactacacacaccctccaggattcaagtctgaaagagaccaacctttccccagtagcatctccctatcgccccctattggcagggcttgagtactacttgctcgagagaggaaatgctcacagggtcctagccttagagtcaagaagcaggaacgtaacgtgagtgcttttttttttcatcttctaattacagttggagaaataaatggttgagtcaataaagtacttgccacacaagcaagaagacgcgccttcacatccccagcactccatagaaaccaggtgtaatggcatacatttgtaatcccagtatttgggtgacgtggcagaaaaaagagggtccctggaacccaccggccagccaatagccaaatggataagaaccaggttcagtgagagaccctgtctcaaaagataaagttagggatcttagggaggggcctcagccagtaaaagcacctgctattcaaactagggagggactgagttcaaatcccagcatccaagtaattaaggaagcatagtcattcgcgcctgtaactccagctgtgtggggggcgtcgagacaggaggatcaccagaacttgtaggccaccagcctccctccaggatcagtgagtgagccagagagtgaccgaggacacctgacatcctccacagcctatactcacacatacttgctaaattaattcatctttaaaaagacagacaataggaaagttgataatgacagaagacacctgattaatcacacacacacacacacacacacacacaattacattccttaaaaccacacagcttgccagtggccctcttagcacctgcctgcttcctttcctttacatcccatagattgcaccagagaatgtcaaaccacactgtttcttttgtaacttactgtctagaaagccccgtcccctcaggcattctgttttgtctttctctcctcttggcttgctcttgagagactgagaaaccaactctgactcccacaatccctcgtttttcgcaactaacttctccacaggctcgcctaccgtctgtttcatttccaggcaatccaccggtctatcccaggcagtaggagtgcccagaagcactggactgaaaccggccatgggaggaacttgggtccatctgaaagccaagctttccaggcttttgagaaatgtaccacagacgtctcagggcaggctggaggttcatcttccctgaccagtctgcagtcgtttgtccataaggcctctaattttagaatttagaacatattaggagagtaggcagttggggggcagaggaagtgactcattgatccccagaaacataagaagctatgtgtgatggcatgaagtgctgggagatgcaggagggtcccagcagcttactggccagcctgcctagcttaaggttcgctgagctccagattcagtgagacaccctgattcaaaaataggtggtgagtgaaagagaaaccctggctcgctcgtgtcatgtatggtgcttgtgcatacatgtatatacatcaaaatagaggaagaaggagaagacaggcagtagagcaaacagcacatttggcagagagtttccgggatgaccactaagcttaaaatgcatgtcaagacagtgttggtaggcatctgccatcttggttttttttttttttttcaaaatgcccatcatttgtggaagagcctgaaggggttccctggtagtggaatgagacagggtacagagatttcttccaaggatagtgtggctctccaaacctaatctgcttagcatcctcggaagctgcctcatcgcttcagaccaaaatatggggtgtgtatagtgattagtaagtgttctagaactaaagaacctaaccacgctgcaccctgatcacacaccaatgaaatcacactcttaaatgatcatgaaaaatacatgtgtgagttgggatggggctccactggtagagtgtttgtttatgttaatacatgagcccctgggctcagtcttaagtatctcagaagaccaggcgggccgataagtctgcaatctctgtactggggtggtggaggcagaaggatcagaggctcaaggttgtattcggtagcttgggcaacaataaaatcctgtcccaagaaggaaaaacacctggatggtggtagtgtagccctttagtaccagcactcaggaggcagaggcaggtgaatctctgtgagttctgggacaggcagagctatgttgaaagaccttgtctcaaaaagaaaagttatgagaagaaaatatttaatcctaggcaaaggaaagggcttgtggcttattttctctttgcttgtctctgtttcctgcaatgagagtgaattgtgaattaaatacatataaaagttaatgagggcctggtgagatggctcagcaggtaaaggcatcggttgccaaacctggcagcctgagttccattccccaggacccnnnnnnnnnnnnnnnnnnnnctcgcacatgctgtggcaggcaaagccagtgggtgtggggccacgggaaaggtgccctgtcaggtgcctgttgccctaggcacggtatgtcctaaccaccagcgctcagcaagattccatctgctaatcttggatgtgttgctctgtcttttcagatttttgacagtgaagccaaagacctcgagagagaagtgtgcttcatcgatatcgcctgtgatgaaattccagaacgctactacaaagagtctgaggtaagtagccgtaatagaagcaactcgttcgttcatttgttcattcatttattccactgtggttgatgaagcacttttttcctaggacacttccatgtgacttttatgttcctttggtttagaatcaacatctcgctggttctttaagattgattctttggtcgggccagcaggtggtgcatgcctttaatccaagcccttgggagacagaggcaggcggatttctgagttcaaggccagcctggtctgcagagtgagtttcaagacagccagggctacatagagaaaccctgtctacgagcctgcgagcgtgcaggtgttttctgtacacaaaatgcatgcagtttctgcaaaggtcaaaagagggcgccagatcccctggagttcttatggatgattgtgagctgcaataggggtgctgggaattgaacccagatctgctggagaatcagccagtgatcctaaccacagaaccttctctccatctctggatttgttaatccaagttcaaagtggagtccccgagctgccctttgtttgcttttggtcttccttatcctctcaactcagacgtcatcccccgtgacgtcagggttcctggggctaagcattcatcacattggcctctcagaatgcagcagcctgtctgtgtgaggacgcagacggcgttacatttctgtctttggtgtttaacataaagaaaatcctcagtcaagcctccaaactttgatggttcatgttggcccagaaaccatccttctaaaatagcaggcaccttcccgagggcttctcttcttgcctgggaatggatgaaggagaccggcttcccctctggcttgtcccctgccagtccgccctctgactcgcctgtgccactgtcgatgccagtcattatttatatcctgttagtagcttattaatggctgctgatggaacttgagtggcccgcttgtgaacagtgtcccagccctggaatgacaacaaatgcagggctatttttgttgttcagctacacgcagccaatcatagtgtgtttattggggcccagatttgtccttgagctctaacgagtggaccttgaagctcttctttcatactcattagagctaatgtcatgcataaacccattaaaagtaaactccgggccactgagatggttgtacggttaaaggtgcttgcagccaagccttgagggcctgagttcaagccctaagaccccacatggcgaaagaatatagacttccacaagttgtcctctaatctccacacccacactgtgcacactccacgtacgtacacacacacacacacacacacacacacacacacacacacgtaaataaataagcgcataaagaaatttttttaattaattaatttatttatttttcgagacagggtttctctgggcagccctggctgtcctggaactcactctgtagaccaggctggcctcgaacttagaaattcgcctgcttctgcctcccaagtgctgggattaaaagcatgcaccaccacgcccagctctttttttttttttaatttcaacatgaattctagttggttacaaactggactgccctgtggtttagatctttacctgcctatttggggatttgtttatctgggaaagccttacttggttttagcagatgccctcctgcttcactaaaggctgaagatctgctaattgcattaaatccctcaggccgtgtatggtagctctcccttcacacaagcctcgcagagactgaagctcacggcttctccattctcagatctcaccagccattttcacagtggctccgagaggatgctctctcaatggttgttgaaggagtgagggagaccgagagctttgtatttccttccggtggtcataattttgtagcaagtgccgttgaagagaatggacctgtcgccattaaactaccagttgggaatcagagatattttgtcctgtagtgtgagacttctgggttactcttgcagctctgtggttgatccttccagcatcttaaagccaggaaaccttgggcagaagctggtagcagggggtgaggtgggggtggggatctgtagttgtgggggagttggggagcctgtcacagggtgtattcttttttcgatgctgataaatccagaccatgtttttctgaggtatgcctttccaccagtctactctcccacatactgtcaccctggctagaggaggggaccaaagctttctgtctctttttcccacttacccctggaagcctctgagcctcccattaaggtgaccagagctgggaattttccactggctggctgctgacagacctactgccacaacgatttgagatctgagggacactttagggacccaggaccagctgatggccctgcctaagggcctggctaattctcatcctgcagggttcctgtttcctacccaaatcacagcctgagcagcagctcccaacacctcttagacccagctcatccttcttttattactttttattttttattcatgtgtttgtatctgtgtgtgtgcgcacacacgcacagatgccttagaaggccagaaaacagcatcagatctcttagagctggacctgcatacagctatgagctccctgaagtgagtgctgagcacaaatgcccataaccactgaactaaccttccagcccctcaagtttcattcttatgtcaactagagggtctgaaaagcagggctgttgtggggtctttttaacgggagcagagagatggctacatgggtaaaatgcttcctccccaagcttgaggaagtaatgtcctagcacgccaggagacatgaccagtaaggtgaagaacggtcaaagaggacacaagtgtggacgacgggcccccgggtattcgtgggtgcacacacacacaattgggaggtcagagagagcacctctaccaagcagcacagacacagagtcctggctgcctatggaattcagaaagctcttggtgccaagtcacatgcccaggtccatcagtgccagcgaaacagcagagagggtgagaatgagctctacacagtctgccctcgcgatgaggctgatatacggcttcttgcttctgccaagatttccatcctgactctctgatgctctgccaagatttcaaggtgaagttcccagtggaggaagcaggggactgtgcagagggcacaggccaagagacccatctgtaaagccaaggtggcagttccagggtaataagagccccaccctacagaactggtccaccctgggcagcctcaaagacaagtgcagagatcttagatgatgcaaatggctctcttgcctggtcatttagtgtgtcccttgctaggcttgccttccacgatgactgtggccagagaaaacagtacgttcattggctccaactgcatctggccagagacacaagctagccagatgtaggagnnnnnnnnnnnnnnnnnnnnnnnnnnnnnnnnnnnnnnnnnnnnnnnnnnnnnnnnnnnnnnnnnnnnnnnnnnnnnnnnnnnnnnnnnnnnnnnnnnnnnnnnnnnnnnnnnnnnnnnnnnnnnnnnnnnnnnnnnnnnnnnnnnnnnnnnnnnnnnnnnnnnnnnnnnnnnnnnnnnnnnnnnnnnnnnnnnnnnnnnnnnnnnnnnnnnnnnnnnnnnnnnnnnnnnnnnnnnnnnnnnnnnnnnnnnnnnnnnnnnnnnnnnnnnnnnnnnnnnnnnnnnnnnnnnnnnnnnnnnnnnnnnnnnnnnnnnnnnnnnnnnnnnnnnnnnnnnnnnnnnnnnnnnnnnnnnnnnnnnnnnnnnnnnnnnnnnnnnnnnnnnnnnnnnnnnnnnnnnnnnnnnnnnnnnnnnnnnnnnnnnnnnnnnnnnnnnnnnnnnnnnnnnnnnnnnnnnnnnnnnnnnnnnnnnnnnnnnnnnnnnnnnnnnnnnnnnnnnnnnnnnnnnnnnnnnnnnnnnnnnnnnnnnnnnnnnnnnnnnnnnnnnnnnnnnnnnnnnnnnnnnnnnnnnnnnnnnnnnnnnnagaaggggggagagagagagaaaggagagaaaagaggggctgtggttttagtggtagtgtgatggttttgtttttgtttgcttttgggggctttgtgggtttgtttatagatttattttatgtgtatgcatgtcttgcctgtgtttaagtacagaccacatgtgtgcagtgcctaagggggctggaaggggacactgaatcttctagaactggagttacatatggttgtgagctgccgtatgaattctgggaactcaaccctagttcctctgcatgagcatcgtgtgttcttgaccgccgagcatctccccaactctctgctaccttttgatcttggcttcttgtttcatatgaaggaaatttctctccctgtcttctttttttttgtttgtttgtttgtttgtttgttttgttttgtttttttgagacagggtttctctgtgtagccctggctgtcctggaactcactctgtagaccaggccggcctcgaactcagaaatccgcctgcctctgcctcccaagtgctgggattaaaggcatgctccaccacgcccggcttctccatgtcttcttagggaatgtaaaagcattcgtctgatgacagaacttagtcattttagtaagcaagtttagattttgaacttgaatagcaataaagaagggtcttacagggctcagccattaagagcctttactattctcctagaacacccaaaatcagttcccaagtaaaatgaatgaggtagggtgtgcacgtgcgcgcgcacacacacacacacacacacacacacacacacacacacacactgtcctagcagtgtgtacccctggtgtacagtggaaaatgtgctggagcagagagggtctttagatggaatttgatttaggactttctccttggactaaggtgactctgaaaacttggtctccaggtccctggattatagtcttcctggcccagagcatccttggcagctggttcatcattcgtagcaatctaaaacgtctgttgactccactcttaagggagagagcagggaacagagagagacgtctaacttttccaataactgtcaagggtgagagattaaatgctgtttgttaaggacaggcccccagaaaggagatagagacaccagatgagtaaatactaccgtccttagctgcacccttccaaacctctcagctctctcaaattaaaatactttcatctgggtctgcatcttcgtggttaagagtactttagcttctcagttacctccaaaggtccttgttggacacagctacctcatgctgagatgagtagttaaattaaacttgttattgtggtggtgtggtgggtggtggtggttgcctctccccgacatcaccatctgtttctgagagaatgaagctgtttgggaattgtcttcccagagcctccggggtaataagaggggtcacaatttgctcagtttggggaaagagagaagtgcccatggccataggggtcctctgtgagaatcttgggacccaggggtagggagccatcaagggagggatactgaagggacgggtccccaacagctgctgcattgctggacctgagccctaccctcaccaggggctgggtaacactaatgctgttagagtctaagctggggctgcgtctgtctccgtaacgtggtgtttgtcacgtctgccatgtgcagagaccctggttccatccctagcatagaaaaaaaaaagagagaagagagaggaatggagggagggagggaaggacagaagaaagccagttcttggtggtcacctgtaggcatgggtatgtaggaaggtagtggggagggagggaggcaggcaagcaggctggtcttggtagtcatcttttggcatagggagggagggagggagggagggagggaggnnnnnnnnnnnnnnnnnnnnggagggagggagggagcccatgaaggcagactagttttggtagtctggacgtagcctgagcagtcagtcttagacaaccctgagaacatgtctcagctcccttccctggttcgtcacagctagaacaaccatacagatgtcatttccccagggatcaacataggagagcctatgctacatagcaagttcgaaaccagcctgggttccatgagatctgtgttcataaggaagaactaccatcccgtgattatcacaaaactaacatccctcatcccaaaccaggctgttgttgaagtcgtgtttgtggtgtttgtccctgagcagagtatagacatagcattattgtagactcagtgtgtgctgtacttgcctttcacaatacactttatctcgcacaccatcttcctgagcccctcacacatctagtagatgtgaaatggctctataatgtgctgccttttctttctttttaaagattttattcacctgtgggagaacggggttgaacttcgtaaaggagtgttgtgtgtgtgcaggtgctcatgggagccagcagggggcgtccaatctcctggaattacacgaggttgtgagccacctgaccagggtgctaggaatcaatcgctggtcctctgcaagagcagctgctgcccttagccaatcagcaatctctctagcttcctcattctgtttctcctaaaacagagtgaagtttaagtggctagcattaaactttgaaccctcctcctgtctcaagcgctcagtgtcaggattgcagccatgagcagccaaactccatttagcatgatgtcaattcattgtcctgttcatggtcttaaaggtgtgtccattctttctcttctgtttgttcccatgtttctgaagagtcaggtcttcctctctgtgtgcatctatatgtttccagtgtcaggtatcttcgatcattctccactacacttatttatttaatgtatgtgtccttatacttagagatcagaggataacttgtggaaatcggttctcgcttttcaccatacgtgtttccaggattgaactcgggtcttcaggcttggcagcgagcacctttatccactgagctaccctctcccaccatgctttttaagatgaagccagactgctgctatgtgcctataaccccaaaaatccagaggtagagaaaagaatcctaggactcactggcgagcaccacagcctgtctgttagttctataagagtctctgtctttaaaataaaggacaattgaataagactcctgatattgatttctggcctatacacgcaagtgcttgcacacaaacatacacataggccaaagtccaagaaagagttcagcttgttgtagagggatctgtgctaaagacagtctaaagaccatcatttgcgcctaagttcgcatcttctgttctcacgtgacaaggggcctggctctgtgagaacacggagaagaccacacccatcacacatcattatctggtgtccatcttcccttccctttgggggtatggatgtaaaaatgaaatgagatgctatcgaggcaagacaatgaccttggtccttggcatacagtaaatgcttatcctggctttgtttctgctcctgtgataagtatcccgactaaaagcaacttagaggagaaaggggtttgtagctgagaagtcaccgtggtgggaacttgaagcagttgtcataggatctgctgtcgagagcagagagcaatgaatgcgcgcagacgtgcctgccttttcctttctcatacgattctgcacctgcagtctaggggatgacactgcccacagttggctggattgtcaagacagtcctccacaggtgtgctcccaggccagcccgatctggatagttcttcaattgagactctcttcccaactgattctaggctatgtcgggttgaccataaaaactaatgaggctggagagatggctcatcagttaaaatcctgctggtcctccagagaccctcactccattcctagcatatacaaggaaagatatcaaaaactaaatctctgaaaaataaagaaaactaaccatcgcagcattggagatgggtttgaggcaagcatgtgcctctggcccgtggctgccatgagtggcactcgggaagtttgtttgtgtgcgtggtgcttttcagtcagcagcatgcatccaggagagaagcagaagtgtgattctgatgacagccccagttccttgagtctcaaaaccctctgcaacctcatcaagatgcttcagaaactaaagccatttgtgctgcaaagagttaccaaaaaatatgttctttcttctcttctggtttaacctcattccaaatgcagcgtgtctgattcagcatctctaagaaaccttagagcgcaaattcaacgttatgccaagttttggcaatctgttccttcaggtcccaggatggtgcctacctttagttcattttcttatgctatctcagaagaccacggagcagttaatttattaacaatagaagtttagttactcacagttctagagaccaggatggccaagagtctattgctggcgtctggtgaagggttcatgctgctttaaacatggtcggtggcaaggacacaattcaagggttaggatctctctgcttactatattcaagtttttaaagcattttattgatacttcatctgggaggaggatagcaatagaagccccaaaatttgcctattctcctcctaaaggggaacacctctgccacttgtcttgttgttgtaacaaagcacccaacagaaataactttggactctctcttaaccgccacaccagtcttattgtttaaaagtttttacagatctggctctccagcactcccctgttttctagagaccagtggccggggtattctgtcactctgttgttctgataaccagtcccccttttgtacgagagctccaactcagtccacctcattaactcagatgagggcatgttggaagggattcctgatggatagatgggaaagacagttctggcttgggaaattccagcaactataggagcaccatcccaggagccacagacaaaggcccagtccttttatcataacaatgacatctcacggattaagtgaaattgtgtatgacgtgcttggcaccggctctggagtcaatctttgtcacacagcccatatgctggtttccctttcttccatccttggctctcttctgagccccacccatggaaagcatcagaaagcatcagtagtgagtggtctttgcggagtgttcagttctttcgtagtgtttatcccaagtccccatcctcacactctttcttttcttctcagcatggtgagttttgaatgtttctagccctagattttaactgggacaggtgtagagcacatgccgaggcaccccccccccccaccacaggaacttttgttctctagctctctacgtgccagacaaaacttaagagccaacttgttctagccgagtcgctttgcagggggatggcataaatcgctgtgtttgcggtacattctggtgccgagagcaaaggccttaaaaatagcactttgggtgctaactgctaacaaagcaagaattgacccttccagccatgacttccacttaggcctgttcttctcttttttttggaaactgacttatcatggctgaccttttaagtcaagtcttcacttagcactcaagtacgcgtgctctgaaaactcccgagtatgatttttgtgaactacggatctcagacccaaggattcacccatttagaggagacggtttgaatcatgcatttagccagggagatggctcgataggtaaaagtgcttgccattaaacctgatgccctgagtttgatccctggagcccacacagatggaagaatagagtcagttcctgcgaattgtcctctggcttccacatttgcaccatggcacatctacacacacacacacacacacacacacacacacacacatccgagacagatcgatagatcgatggatggatatagataaaatgtaatttaaaaatatattgacggatatgtccccacctctccctcatccctgggaacccactgatctacattctgtcttgaacatctcatatgaataggatcacttagcattccctcctctaggacaatagtctctaaaagtgtttatgtacctcttgtaggattttaagttcaagaaaccctgtactaaattttgggctaaacttcttcccagtgaaatagccattcatgggtggaaaatgatcccagcattctagaggctgaggcaggaggatcacaggtcccacatcagtttgggctacacagccagaccctgcctgaaaaagcccactgtaacagcactggaagctgtgctggttgttctctcattgctgtgacaaaccacgtaacaaaggcagctcacagaagggagggacttattttggcttagagtctgaaggttcgtttcgtccatcctggcacggtggtaggcatatgaagcaagcagctggtcacgtgggcattcacagctgggaagaggaagttggacgctggtactcaccttgctttctcctttttatgcaatccagcagttaaaagagatcttcccaccttaattaacctatcctagaaaattccttatgcacacgcccagaggtttacctccaaggtgaactagagcctgtcaagctaatcactattagccatcaccttggagtgaccttggagaaaaagaaaatctagcatggaatttgtatttcattacttcctctctactttggggctaagtattatcattatataatatagcaattcccggctggggttcccatttagcctttttatatttaacgtttatcaaaaacttatcatttcaattagcagggcaagcccctgttggctattgtcctttgtgattctgactggaggtgtaattaatcatggagacgttatatctcatctaatgtggctaatagtattacttcccagatgcaagctctcctgtagctgggccaagatcttctgtgggcttctctttgcactttccagatgtgagtttaataaagtcacgcaggaacagtttcccatgggctcctgaaagcctaattcctcagcattgcctctgtaggcttgtcctggtgtgagataccaatgcctccaggtattgctgacctagtagagggaaaaccttctacagatgtgccaaggggaaggagtggcgagccaagttctggggaaattgccttggcaccagctcagccctctctagatagatgggctttaactgcaagtgttcaatttaccatctgcctggtctggagaacaccagcggagtccagagccagagacttcaccactggaggaatggagaagcccctggccagaagaacacagccttacccatctctaggcagtcagctcttgggctagaggagctgagtgcatatctccaggccagagccctgctagcagagtttcccaatcacacagtggatccactcgtagatagagtggtgtttgggaagctccgagaccaagtgactaaacggtagaagagacatcagaaatctggatatctgactaatctctctcatccggtttgaatgcgagatgttgcccacaggctcagctggtggcagtgttctgcgggaggttgtggaacctttcggatgtggaggcttcacctataaaagtagattcactagtgggtggagttatatccacttctgggtctggcctgggtctttctctgccttgtgtttggcgaatctgggaggagcctcccaccttcatgctgctcccatcatgatgaatggagacactctgaactgagagctaaaagaagacttccctcttgtaatcaacttctaacagatattgtgtcacgtaacaacagaaactattacattcttctatgacccttggtatgggtttaatggtgcccatctgagaagatctaaagccagcgtgataatgcacttgggaggccgaggcaagtagatctttgtgaattcaggacaccctggtcttactttgtaagttccaggacagccagggctgtataaatagacaccctttctcaatgaatacataagtaagccatcaaagtcttacttgtagcatttatgtgtgtgaactgaagctagagaactgtaatgtgtgggttggttagagtcactagggtcggccttgagcccatatgactggtgtcctttatgtgaggacacaaaggcagaactgcacagaagggagatggtatagacacacaggggaatattgcctgtgatcactcccaaggtgtgctttataagcccaggaatgtcaaagagggccagcaaaacccctagacgctgaggaagacaaaggcggcaggcatgacaccttgatcatttcggatgtctgcttccacactaagacagcaaatctccatcatctaagccctcagtaacagaacacaaaatacccaagtgccccacctaggagaagagctccacccaccccaacttgacagattccaggaaggacaaagaacagatagctaggggtgactttcatcacacccaaacatacctgcaagtcaccttttggggtgttcaatatgaacccatcctgtgtcaggaagtacctgatcagtggatgccagggaagagacatctctgggtggctcctgagtgatgtcctcaggtaaagcccattcaacaaacagcccatagagcaagtagtgatacatagtgtgtgggcactgaacactcccatgtgaccttgaccatgtgtctcaccaataataatttgtgttccagtaacaactatcagcccctctctggaggctaggcatgatggtataacctatcccaacactcaggaggtaaagacaagcagatctccgtgagttccaggatagcctggtctacgtagagacagccaaggctgcatagtgaaaccctgtctaaaacaaaacaatacaaccttctcttgaagtacagacccagacaggtaccaacttcctaaaaacaggagtgctcagccagtctataactccccaaaggaaacttctattcggttgtgtagtcatgtttgtatttgagcttcttttcctacaaggttgactacaggattataggtagccaggtgggccagcagctgcctgtgtttcctcttcagtgcttgttgtgagctgagaaaaccacatgatagcctgtttcatgggcttcatgtctgtgtgactctgtgatgaaggcaagcattgggcactttcggtgttccgtgctgagagcatcagtttacactcagagccctgtggtgactccacaggacagttatgaacaccaccccaccttgtggatctcctttaagtgactatgccaggatttcagatgaaatgtcctgtcctcctgtggtaagggttgtatctttctccactcagactactgtgacaggagactgtagatggagtagctttgaaacagtaatcgtttctttcttaattatggaggctggaaaattaaggctgtagccgatttagcctggctagacgagaacaaacgtctcttctccccaggtagagcaccggtgacagactgaggaaagggatgcacccaaatctcttggttgggtggagttacttatagactatgaatgaggagttacttagaaggtcactcaaaagcagcttgcatcaccaaaagcccatcccagcatgggtgatggctctctcaagctgcattgctggagatccacacatagctggctatcagctgcaccggcagaaaaggctctactctgcaacaattgtttctggttacagaaccttgtaactttctgaattctctgaaccttgtaagtttcttgagtttccggggttgtgcaagttgctcagacttctctcctgcctcaaagagggaatgtttcagtttagaggaaatggctacacagaagctgctgtagggtcctgaccctggttcctagatggtgtcattacaacaaaaaagacccaggaactcaccagagtctcttgcctacttcttcctgtagtcaaatctcatcagtgaacggggtggggaggtattcgtggtgagttaaacacctggacccagggatgaggggacagtattggatatattgctgatcatgtctgagtttcaggctccttatctgtttatatctaatagcagtggctaaacctagatgttttaagattctgagtgcccaagtccagttcaagccaagctctgggaccttgaccttgctccacctacacttcttccctagaagtctctgtcctggtcttgagctcaggatgaggctcgagcagtggttctcaaccttcctaatgctatgacccttcagtacagtcccttatgtcatggtgatcccaactgtaacaggatttttgttgctacttcataactgtaattttgctactgttatggattgtaatataaatattttctgatggttttagataactcctgtgcaaaggtcattcaacccctagcccacaggttgaaaacggcttctccagagggtgttctggcttctagttcctacaggaggtcatgggttgtaactgagcaactccaatctttgcctctgtccccaagtgactctctttgtgtcctcccatctgtctcttccaaggacacttgtcattggacctagggcccatccatttaatcccggatgatctcatctaaagatccttagcttaattacatctgcaaagaccttggtttccaatcacatcatacttatagtttccaggggcaaaggcgtgcacttcgcataccctttggggaatcaccagccactgcacaaaattttcagtgtattggactccagcagtcaggaagctgagggaggaggattgccacagtccccatgtcagcctggaccacagaataaaaccctgtctgtcgatagatagatagatagatagatagatagatagatagatagatagataaagacaacagcttcttggtcacactaacacaaagcattatgtccttttatgaaaagctaattaactgggctggagagattgctcagtggttaagagcactgactgatcttccagaggtcctgagttcaattcccacatgtgagccacatggtgactcacaaccatctgtaatggaatccgatgcccttttctgatgtgtctgaagatagctacaatgtactcatatacataaaataaataaatgctttttttaaaaaaagctaataacctagcttagacagtggtggctcctgcctttgatcctagcacttggaagacagaggcaggcagatttcggtgagtttgaagccagccaggtctatggaagcagttccaggacacccagaaaaattctgtcttggggtggggggacagaaagaagctaacaaacaaataagccctaatagccaggctgataagatggcttagtgggtaaaggcatctgctgccaggcctggtgacctacatttgacccatttacatggtgaagaagagaaccacaaagtcctctgaccttcacctgcacgtatggtgtgtgtctaagctaagtcaagttatacctgctggcttatatgggtacacacacacatgcatgcacaaacacacactcacgtagacacatgtgtacacacacaagcaccttttcttggctcactactgtccattcacatctgattcagagtttggatcaaaggtatctttgtggaagccttccttctgtacctctctccagcacttggaacgggaatctctaattataggccacattagagatttactagacgaaattatcagctatagatatgacaccagtcttgggtggggaacatcctgttcccatacaaagcccaactgttaatcgattcttcaggactgagttatgtttaaaaaagaggaaaaaaaaaaggctatttaattttgaaagtaaatgtggcagaaagaacactggcctggtgtgatcttcaggtgaaatatctgattttttttttcacaagtctcggtgtctttgtctagtaaattgaggacataaaaccagagtatcactgtccacttaggacattctattctgggcgcctgctgcccagcctgaggaactgagtttgagctccagaatccatgtcggggaaggaaagaactgagtcctggattttcctctgaccttaacacacgagctactagcttttacagactttaccttctggctgtggtaatacagtagacttctcattcacatacaacctctccccaaactctgattcataatagcctactataatttaaattttttttgtgtgtgtgtggagccatcaagaatcataccttgagactggagagatggcataaaggctttgccatagtggtgtaaagaactgggtttgtggatgcccatggtgtgctggagctttagctaggagaaccctccgtgctccagaagggtcacaatgttgtggggggtgaccagaacacctgggctacacatgacaggctcctgaagggaaaaaaaaaataggagagatgggcagaaaaagaagggctagctagggagaaagaagccttggggaaagttaatgatgtcctggcagggttgttcagtggttagagctcttgcttgctcctgcagaatacatcatgagtgctggcaagcgctcgaccatctgagccacctcccagcatggtgttgtatgtagttgtatcttcagctgacaagtgccacagacagactctcaaaagagaagcaacagaggaaggacagaggccctgccttgtcagtgtgaaaccggaataagaggtcatttattccgagctaaatctgagtggccatgcagggatacagtttcagattgtgcataaagatgtcttccaccatgaataccatcgctagaccaggctattagctttatttctttaagcctgcatgtgtgtgcatgtgtgcgtgcgtgtgcatacgtgtgtgagcatagagtcagtagacagctttcaggaggccattgtccctcctacctgcttggtcttctgtttctccatttgtacagcaacctcagttgcataggttactggtctcatctccccataagtatactgggattacagatgtttaccaccacatctggcttttttttaatgtcattttaaatgtttttatgtgtattgtttcgcctgcacgcacgtctgtatgagggtgtcagtacccaggaactggagtgacagacagttgtgagccgccatgtggggactgggaatcgaacccacatcccctggaagagcaatcagtgctcttgacagctgagccatctctcaagcctcccatggggctttttatgtggattccaggaatggaagttgggcactcaagcgtgcatggcaagggtatttacctgcatttcccaagcctctccagctcctcccaggaaatagtgcccccccccctttaagatttatatgtatatgagtacactgtagctgtgtcttccgacatatcagaagaaggtgttcaatccgattacaaatggttgtaagccatcatgtggttgctgggaattgcttggaagagcagtcagcactcttaacctctgagccatctcttcagccccatcagtgctccccttagtagtctccatggtcctccctgttcctagtccctagtaaccatggcctactttctgtctaggtggattttgcccattctggacatttcatatagatagcttttttttttttaaaacaacaacaacaaacaatgtttcaagtagcccaggctagcctcagactcaatataactgaggtggtcttgaactcctgaccaccctgcctctgcctgccaagagctggggttacaggcctgtgctgccccacgcacgctatgaagtattaacataccggcttgtttggtgtgtcttttctaggatcctaaacacttcaagtctgagaagacaggccgagggcagctaagagaaggctggcgagacaaccatcaacccatcatgtgctcctacaagctggtcaccgtcaagttcgaggtgtggggccttcagacccgagtggaacaatttgtgcacaaggtgggttgttgacctggtccctgggatgtggacaaggtcccgattgccatcattgcctggtaggagatagaatgtttgcccagtgccccaatgctgaaatggtaccaagtacttatatctagaaaatacttagaggtgaaaatgcattttctacaagggtgtaattttctcccactactctgtgtagcagttttacagatcatttctcattctgacctctgaatctaccagatgagtatatttgggaagttggattcacagaatgttatgtcctgctttgccagttaggttaatctaccttcagacagggacaccgggcaagagcccagaaggcttatctctgggtacagctcccagggataattcccccttggaagaacttgcacacataggcaccgtaagcagaagaggcccccagaggcagaacaagagctccaagtgggcccaacgcttctccctccactgtcccctcgctaaaggatgatgaccaagcccagagcgcagactttaaccaggccctcgctttggaaaacagattaactttgggggcagaaatcaatttgatggcacaagttttctccaggtcttaaataggactcttccatatgactctaaaataatggaacaggaggtgccaagcagagccctgtgtaactgctctcatttacataaggataaataattgggccagtgagagcacttgctgccaagcctgacaactgagttcaatgcacatgctaaaggagtgacctgatacccacaagttatttatcctctgacctccagccaagtgttgaggcttgcatgagcgtgtgcgcacacagcaataaataaatgttataaaattttagacagctggtcagtggtgatgcatgcttttaatcccagcacttgagaggcaaaggcaggtggttctctgagttcaaggccagcctggtctacagactgagttccaggaaagccagggctaacagaaaaactctgtctcaaataagaccaaattaataaagtaaaaacaaaataaaattttaaacagacacataaataattcccaattgtcccaggggctgcaatgtggctctgttgacagattgcatggctagcactcacacagccatgtgttacatcctcagtactccagaaaccagttttggtggtgcacaccctaatcccagcactctggaggttgaagcagagaaaacagaagttcaaatttatactcacttgcatagtgagttcaagaccatccggggttacaaagatagatagatagatagatagatagatagatagatagatagatagatagatagatagataggaccctgtatttaaaacaaaacaaagagccaggtggtggtggtgcatgcctttaatcccagcactcaggaggcagcaacgggtgtatctctgagttcaaggccagccagagctacacagagaaaccctgtctcaggatggtatggtggggaacaaaaaaaactccaagtttggggctggtgagatggctcagcaggtaagagcacccgactgctcttccaaaggtccttagttcaaatcccaacaaccacatggtggctcacaaccatctgtaacaagatctgattccctcttctggtgtgtctgaagacagctacagtgtacttacatataataaataaacaaatctttaaaacaaacaaacaaaacaaaacaaaactccaagttccttttctctatatctgagaaaagttggctgtctgattttttttctactaaaatctaacaaagaatacctttcccaaattccactagcagcaccactgtttttccaccagggctctgagtttttctcagctggacttgtctgcagaccacagccatttgacaatagcaaggcggaggattgttttgatgcttcaagatggagatcctactatactgctgaggctggccttaagctcctcctgcctcaggcttcccagtaactgggatttagtagctgtgcctcttgcatctgggtataaagtttcattcttgaagttaggactggaattgatgacccattcctgcacccaggctagtgttaagagtaggctctgcgatggagccaaaggattgtttagtttttacatgaataccatgtagttctctgctgggctctgtatacatcccacccaccagccaggagagtgaatgggtgaggaggagcggagttgtcttagttagggttttattgctgtgaagagacaccatgaccaaggcaactcttatgaaggacatttaattggggctggcttacagtctcagaggttcagttcattttcatcatggcagaaagtatggcagtgttcaggcagacatggagctgagagcattacctaaatcttgatccaaaggtagccaggaagagactctaccatgacacacttcctccaataaagctacaactcctaatagtgccacttcccatgggccaagtgcattcaaaccaccacaggagtcaagttcagagacagccctagttctctttctgttgctgtgattaaaaacatcctgacaaaaggaaacctgggggcaaaaagatttattttagcttattattccaggctgcagtccatcattatgggaatgtcacagcttaaagcagttaatctcatctcagccacagtcaagcgctgagagaaataaatgcatgagtgactactgctcagctcactttttctactgttaacacagttcagaacttaaacctaaggaatggtgccacccacaatgggcaggtcttccccacagcaactaaagcaattaataaaaatcctcctctgggcatggtggtatacacctttaattccaatacctggaaggcaaagacaggcagatctccatgatttggagaccagccttgtttacatagcacattgcaggctagccagggctaaatcatgagagcatatctcaagaaaagaaaaagaaaatttcttcccagacatactggtaggtcaacctgatctgatctgggtaattccttattaaggctcccttcccaggcaattgtagactgccagttgacaattgtaactcctcatcacagaaacttcatgttttctttctgggtcctgaccttggttatggagcaggaagacaaatcacagagtaactatgttacagcccaagctccatgtctcccttgccctcgctttcagatttacattctctcatctctcttttcctctccttccctctctcattctccctcctttgcttttgttcttaaaaaaaaaattatgtttctgagtgttttgccctcatgtgtggacacaagcatgtctggtgtccacatcgatcagaagagggaattggatctcctgggactggagatatccaagtcattgtgagctgtcatatgggtgctgggactcaaacccaggtcctaagcaagagcaacaagtgctcttaacagatgcgccagctccccagctcctgtttttattcttttgaagcagggtctcctacagcccaggctagcctcagactcactgtgtagccaaggcttgcctcgagtgctcaaatgctggaatttcaggtgtgtgccaccacacctgtctgcttctttccctccttacaagagaccctcctaaattatctcctctaactaaagaatcaccgtggtggtcgtggatctcatttcctctcccaaaacaagctcctttcatttatttccttgacaatgactttggctcaacccatttctttaaagtacctgtgaggattctttggcttatgtattatcacacttcagagcctaattccaaactaaaggaagtattataaccccgcccccccccaacacacctgttctgctaatgagaaagtgtttacaggggttgaaagtagtgggtggtggaggagctttctctaaacacctttgttttttaagaatctattcagtgatgggggggggggggcgtattcaaaagccagccattaacgcattattgaggccttgttgcgagccacagctgtgttgtgcttaatgtgacagggcgcatttacggctgctgttcttttgatttccatgaatttgacaccgtcagcacccgagtgtgtatggctgcatggtctttcttagattcattacatgtctccacttccaaatcataaaagggcctcgaacgaaatacccagaggcaggaggaataaacacttcattagaaacgcttcccttgtttctgaaaatccacccaattaaaaccctttgcttatcgaaacccacttcagcccttccatgagaggttttttgacaatcactggattttgtttggcaagaagaaaggaaggaatgttggaggctggctgagagtttccaagaaatgtaataaggaatatttatgggctggggagatggctcagcaggtaaagagcttgctgcccgggcagcagagccttaagtttggatccctggcacctacataaaagctaggtctaggcatgtaatgcatataaaggtataacaacgctggcactggggaccagccaggctagatcattggtgagttccaggtccagtgagagaccctgtctcaaaaagtaataaaacctggcaagatggctcagtgggtaaggagacaaccgacttctgcaagatgtcctctaactgtcacacacagaaatgtgccatcatacacacacacaaagttaatgttaaaaaaaagtttaaagacaagcagtggtggcccatgcctttaatcccagcacttggggacaaaggcaggcagatttatgagtttgtggccagcctggtctacaaagtgagttccaggacagccagggctatacagagaaaccctgtctcgaaaaaccaaaaaaaaaaagtttaaagaaagttgatagcaatagaagacttcatccaacatcagaccattgcccttcaagtgtctgcatgaagtaaaagtactgaagttgtatcacacatgcctacaaacaatatcatctcttctttagccttctatcccaatttcccacgaagaaacaattgcaggctatacaggtttaaggacctgagtttggactacacatacttttaaccccagctctggagagcagggaattggcagatcagagagtctgctgtccagtcatcctggcggctcaggggtagagggacagtgagcttagccacaagcttcccgtttactacgagaccctgtctaaagacagcaagcagaagaggaagacacttagtgtcctactctgacctcctcccaggcatgcaggtctgcctacacagtatacacaccatacacacaaacacaccgaagaaaacagagaaatctgtgaagaagtgagttcccaattcaggggatcttggcaaccatgtttctctccctcctctccctccctgttcctcttctccctcttcctttcctcctcctcctctttctcctcctttttaaaatttgagacagggtttcctctgtgtggccctggctgtcttgaaactcattctgtagaccaggctggttctacctgagatcttcctgcctctgcctcccgagtactcgggattaaaggcgtgcaccaccaccacctggccccatccatcagtttcttagtccttctgtttgaatgtgctggcaccacaaactgacatacatgggtgaagtgtttcctccttttggtaaactgtgttcatttgctattactacctgtgacctccatgctgtggaggtcagagcacaagagttggttctctcgttcagccataggccctgtgcatggagttcaggttgtcagtttacataacaagcacctttacctgctgagctgtactgctagcccactgttgctcctgatcagccctgttccatattcgtggtaaatggcttcatcttacctatgagccaggctgaaggtgtgtgcagactaatgataactcctggacactccctcagccatcactgcaatgcctcctctaggccggtcaccttgagatttcactggtacagagcctgcctttcctttgaaggaaggtatgtcttgatggaaatgaacccctttctgaatagcaaagctcgctgtcttggtgacttttctgttgctgtgaagagacaccatcaccaaggcacattataaaagaaagcgtttaattgagggcttgcttacattgcacaatcatggtggctagaagcatgccggcaggcaggcaggcatggcactagagcagtaagctgagagcttacatcttatctgcaagttggaggcagaaagagagctaactagaatggcatggatctttgaaacttcaaagcccacccccagggatgcacctcctctaacaaggccacacctcctaatcctttccaaatatgtccaccaactgggaaccaagtattcaatcatatgagcctataggtcattatcatttcaaccatcatgcactattctctttctctgatgggagatgccccagcactcacatcccatgcgattgcttgggatgttcatagaccagtgtgttgggagtgtcagtaacacttggttccatttggaattgagcaatgaatgcaggtgaccaaagcatcatccttacagtatgtgagacacaagataagtaaatatccttataggcttgtgtcttagttggggtttttactgctgagaacagacaccatgaccaaagcaagtcttataaaggacaacatttaattggggctggcttacaggttcagaggttcagtccatcatcattaaggtgggagcatggcagcatctaggcaggcatggtacaggcagagctaagagttctacgtcttcatctgaaggctgctagcagaatactggcttccaggcagctaaaatgggaatcttaaagcccacacccacagtgacacacctattccaatagggccacatcttctaatagtgccactccctgggccaaacatatacaaaccatcacggcttgatttcatgtaataaaaaggaaaaacaatggatgattattgaaagagattggggctagagagacaactcaggggttaagagcactcactggctgctcctactgcaaaccagatttggttcccagcacccacgtggtagcttccaactctagttccgaaggacctgacagcctcttttgacttcctcagattctgcatggtgcacatacatacgtgcaagccctgcacttacacacataaaaataaatagatctttaagaaagagatgaaatagccgggcgtggtggtgcgcacgcctttaatcccagcacttgggatgcagaggcgggtagatttctgagtttgaggccagcctggtctacaaagtgagttccaggacagccagggctatacagagaaaccctgtctcgaaaaaccaaaaaatgaaaaaaaataaaaattttaatgtaaaaaaaaagagagagatgaaataagaaatattattttattttatcactattatgatgatgatgatgatgatatatggaagaggggatgcacttgccgggtcatgctcttatggagaccagaggccaacatccttgtctctctctgtctctcttcagatttttaaattttctcctaaattattttactacgtctttaacctttgtttacctatttagggggagaggaggacatttgattgcagagaaggacatttgacacatggggaggtcagaggacaactttcaggatctgttctctccctccaccttgtctaccaactgtgacccagatagtgaactcaggcaggcttccaggagtcacctttgccctctgacctggctccctgaccccagtttatgttttgagacaagctctctcactaaacttggggttacctgataggccagaaagctctggtgaacctccatttccactccccccagcactgtggttacaggacatgcatacattaaaacatctaatttttacatgggtgctaaaaatccaaattcagtcccttatgcttaaacaggcagcactttacccactgagccatgcccctagcccctcaacccccaaatgttcttggtcacacctggtattatctcaacctccttttctcactcttcaggtggtccgagacatcttgctgattggacacagacaggcctttgcgtgggttgatgagtggtacggtaagtccgatggcccaaaataactcggagaatagtttcgtaacacctcgacttggctttcagtccacccagcttcacgtgtaacctagaaggacaacaacaaagcgtaggccaccacttcctgtattggaaatagctctgtctggtgagcctaataaagatgtaattataggagctcggtctgaaataaccatagaactattgaccaagtaggacctcggcatgcttgatgcttgtcttaccgacactcggggctccattgttctctgcggggtggatttcacacccatcctgagttacctcaaacttcaacattatctgatagaagcaccttatttagtaacagtcccttgatgcaggaaacatttgaaacagaccctcatcagagacatacaggttctctaagatgtcaaggacagatggagggaggcatatgtgactggacaactctaatggaaaatactgctctggctttttggattctttgaggtttttttgtttgtttgtttgtttgtttttaatgtcattcaaaagattttaaacaagttctgcaccttgtcagtaaataagaacaaggtttgcttggtaccatgatggatggaccaccctccctgggtgctcagcactacagctgtgtggacatgagtcccctgcctcccccgaatcagtcattaggtggcctgtgtccttggctataaatagaagtgagcacgcccaaccagtgacttaggatagagccaactgtgtgtgtctgttgtcctaagtcacgttatttgtcctagatgtaccctacattgtattttggtctttttttccccccacccttattccacacatgccctccgtttccagagcagcagctgatgccctccgctatcctatcttaaagtgaaaggctacattgaacagaatgggtgaaggcagtgctggtaactcaggccacaggtttaaaaggcttggtctgccgggctacagggttcatttagtctcatgtttccattttcccagctctgcacctactgaagagtaagcgcttcttcctggtttgcccaggtgcccatccccgcttggattgttaggttccacaaccacaggacattttcatgcactctgctgtcaggaagactctccacgaccagagataggtcactggggaatatcctcgaattaatatctgtcctgtcttctcaactttacttctcagagctcatggttcccttgttaccatcttctaggaactatcacaaggctagtcaaagagcaataggcctgcattgattacacaaaggacaggcacccagagagtcccaaaatctgccaccttgatgggcaagaggcaaagctctcagctaggtttctctagcaccagaatgagactgagggcttttcagaaattttaaaaggaggtcttcactctgcttatagaagtaaaacattccaaacctgcccttccaaaaagagggttgggggccagcaagatggctcagtgggtaaaggcatatgctaccaaccctggtgacctgagtttgttccccagagcccatgttaaaggtaaaaggggagaattgactccactaagttgtcagctaacatccacccaagtgtatcatgggatatgcatatcatgcacacatatacaataaaaatttttcttaatgagaaaaagaggttgacaaccattataggaggaaaaaacgaagtgggactgtgtatccagtaaggggaatatggagactagaccctgattcttttcagtctcagctaagcccgtagcaaggaagtgatgactttaggccatttaattatgagagtgggagagacttgcctcgcatgtgcaaggctcctttagaattctcagattattacaagagcctgaagctagaataatatattagatgaaacacaggctctccagccgaaaggtctttaagaattcctacctatttacttaggatgagaaggaaggaagttagcaactcaaagagtctcttgatcacaaaatcttctttgtgactgagttgtggttggaaggcttaggctttggtgaatgtagaccatcagggctggctgtcgaccccagagtggtctccaccccctgtgtccacattgacagtctcaaccaaaacaagcagccctttcaggcagcaaggatctgagaacgacaccatcaatttggtataacctcttgcagacctcggcagcccagctgagctgctggcctggaacacagtggctccttcattacctgtcgcaggctcgcaggaaattaaatgaatagaaacaggccctgccacacagtgtctcctcagccacttactgattcaaggtcattcggggaactatgggtctttcagatagatgggtgtgttataaccgaggcaaagtccaaacaaggataaccctttggctcgggtaccttgagttacctttttccctttgatcacatacaggctcagtgaggcccctgttaataaacatggacagggtcccaagtaaagcagcctcccctggagccacaatctacagttctggttctcaaagcaaggtccctagacctgcagtctgcgaaactcctgggtattggttagagatgcgcagtctccaaccccgagcccactgtggttccagaagccctccaggttgattccgaactgttggctcacagcctgggatgtaaagcagatcagtttacaaggacagcttaaataattcatttagattattatcaaatagattcgactagaaggatcttagatgtcttcagggccagctgctaagctctggcaccttataagaattaaaagaagaagaagtaagtagccatcctcctttaagcagatgtgtcagaaaagggcccccttctgggcagactcagcaggtgctatattgttggggctgggtttgggtgctgttcacctcctgagcagtatgtttgggtagtgcaccctgtctgtccttaggcatcattcaggacactcctggctgcccccctccttttcaaattagactccccatctccagtgtttaattaggagtgaagaaaagacattgttcaggatggtgatcttttctcacccaaggatttatttctgcatctccactgagttccagcattcttggaagtcacgaaaccatctccctaagcagattttattctgctcatgttcttcgtaaagtatcgccgtggccatgttggaggagttgagtttgctttccaaggccctgattggtctttaatccgtgagccttgagcctctctgcatgactagaacactaatcagctgagccacgacacatttcaggagatggggtgagaggggagacagataaaaatagccagcccagcttcataaaaaaaaagctcggattggcttctcaaatctgacagtattctcagagaggctcattgaagattgccacagggaccctgtgactgaggggggcctcacaaacgtctttgaaaacctgactcttccccaaaaaaagtatgtgggaggttgagtcctggctggcagatgaaacggccttatgaagtcgcttagaagtcagccgggatccctagagaaggcttgacaaggcaagaagcaagctcaggtggagaaacgagccacagctgcatgagtccaccacaccagcatcttccaggggcccccaggtttcctggaagcagaccctgagcctgtgtgtgtgtgtgttcatctttctaggaagggaactcataacgtcacatcgtttccttttcaaaggagccagtgaacccacattccaactgggctgaacccactgagcatacattccaacacccccctaaaaacggtgggtgtagtgataccaatctatgaccccagtgcttggcaggcagaagcagaaaaatcgccacaagtctgagaccagcttgtactacatagggagagactacatagcaagaccctggctcagaacagaggctggagagatagctcaaaggataaaagcgcttgttactcttacagaggactggagttcatttcttagcattcgtatggtggttcgcagccacccataactccagttccaaggaatcagatgccggcttcttacctctgcaggcaccaagctctcatgcagtgcacaggcatatacatgcaggcaaaacacccatgctcataacattaaattaaatttcaaaaaaagaaaaacaaaaaatcgcagctctcaattgccattctagatctcagtcgtctgggttgtatggaaaatgctgtgttcccagtattgaggattggccgattccaacacaaagaaaatggaaaggccttagctttatgtaaaaagtatgagttaggttataattgttctaatgagttgttttacgctcctactaggcctaatgatgcatgtctacaatccctgtattcaggaggctaagacaggaggaggatcatgaatccctagccagcctgggctacatagtgagttctaggatagcctaggatacataatgtgaccctgtctcaaaacaaacaaacgaacaaacgatagtaacaaagagactttaaaattgaatcttctggacagacggccaccagtttgctggagacaggtgcccagtccaattcatcctcaggtatcttccaaggcccaaaacttgttttaacttcagttttgcctcagaatgatagaacaattatctgttatagcctaggagggtaaaaggggagagattagccagatcaagtaagccggagccactgcaaatgcagttgagagccaatctcaatctctctctctctctctctctctctctctctctctctctctcgtgtgtgtgtgtgtgtgtgtgtgtgtgtgtgtgtgtgtataagaatccatcagtctcttacccacaattatcctcagatgtcctaagactggtcacggaagctataaggaattaagccctttccttctataattcagtactatttggattcgtttgtggtatagagcatgtgtggggtcagaggacaactctcagaagttccttctctctttttaccacgtgggtcttgggatttgaattctggtcaccagacttggtggagagcagttttcctggtgagctagctcaccttgaattctttgtctgtaacatgatcctggcattatttgaatgatggaataaataaatagtagttttaaaacattttttccaggggctaaagaactagttcagcaattaaaagtgttcgctgttcttcgcagagaactggagtttagctcccagcacccatgtcagacagctcacaaacaccagtaactgctgggatctaaagaccatttctggtcttccctgggcacacatacaaacatgcacatacatgcatgcagacacacaaacatccatataaataaaaacttcaaatagataaaatgaatactaaaatgaagccagatgtagtagcacatgctaaataatgaagacacaagagacagaggcaggtggatctctgttagtttcaaggcagcctagcctataggtcaagtttcaggacagcaagagcttcatagagatgccttgtctcaaaaaaattttttttttactaaaatgggcctggggctgtgacttagttggtgtagttgttcctgtctagcatacataaaaccctggttcagtctggaatgttgcataaacagtacccagcggtcagaagatggagtcagtaggacggagttcaaggtcaccctcagctatctaccaagttcagggctgccttgtgccaaatgagaccctgtctcaaaaatgtgtaaaacaggaatgatgatactgagcactgtgggacacacctataattccagtatttgggaggcagaggcaggaagaccaggagtccaaggccagcctgggttacaagagaccctatctaaaatcaacagcaagaaagatgataaatattgaagggatagaagacccatttaattgaaaactattttaccgtatcttgtgagtctttagctgatggttgaggaaacaaagaaatagcctcaactgacaaataccctgggacaagaacatctttaccaatgttaaaccaggaacagagggaactccacctcaacggagtcactttgtgcagaagagggcgtcacctaatcccagcactgggaggcagagacaggagaatcctgccagccaatcagtgagctccaggttcactgagaaaccctgtctcaaaaaaataaggcagaggggctggagtccagcagttaagagcactgactgctcttccagagggcccaggttctatcctcagcatccacaagacagctcacaaccatttccagtcccagcaccagaggatcccacgctatctctcatctccaggagcactgtctgcaagtggtacacagtcatacatgcaggcaaaacactcacagacacaaaaactacaacaacaacaacaataataataataaaatacagagagatagtaaaagacaccagaccttgacctctgcatacagctgcatacatatataagcatatgcacacctacactttacagagagagagagaaattatggcctttcaagattgattagaagtcatcacttaaggctgtcttgcatttagaatttgtctgaaagccagcaagatggctcagtggtaaaggcctccaaaccagacagtctgaatttggtacccagagctcacatggtagaagggagaccagactcccacaagttgtcctttgaccacacatgtgtgctatgatgcgtgggtgcgagtgtgtatacgtgcacatacacacacacaaataaatgttttaaaaaattgtttgggtgataacctcagaaaacctttgtttctggcaagagctctgaacccaagttgccagaaattactctgatctttgaaaaatcaatcagtaagaggatgaatcgtcttccgaagtgtgctctgagtatctgcaattgagcattgatgttcatatggattttgaggtaatatccattgcaaagacaatgcatttaaccagataatccaaagtggacctttcccacctaattagcgtttccataagttactaaggcagactgataagtttacctcctgttcgtatgcatttatggtatgtggaggtatttcaagatttagggagctttttcttagcaggtagcttacctagcttgtagccgcagcagcatccagcactgggaggtggagatagaagagatcaggagatagaagtcctcctaggatacacagggagatttggtacctgggctacatgaaaccctccctgtctcagagagagggcgtggcgagggggagcagaaatagatgctctcataaggaccctccctaccagtattacatggtcttctacctcgtttggtttggtcttatgcttttggttctgttgtcaatcacatggctccaccagtcccttgacttgttttcaaatctcactatgagcaaggcaccgatcatctttgccgccgaaccctttcttatgcccacaaaactgatacggctctgaaagtccagagtctgcccatggtaagtccctcccttctgtgaagattcatcccagtaaggcagtggactctttgccttctctgggtttcgttttcccaattaattggttaatgacgggtacacaaagaaacacgtttttcagttttgaacttgtacttaagtgggactgcttcgtattcctttccaggtgtgtttgtggttaagaaatactgacaatcagtcgttgaagttgtgggggtttggtcttgcagaatgtgttattgttgactaagtcccttctgtctttaccctaaagaagcattcttttattgcttgtcaataacctgctttctaaaagagcgtgtccttgcttgcccggcctgcagcttagccttctccatacttacattgcttgtggacagcattctgatggacgactccagggctgacaggagcatcttgagttcaataaaatagcccaggcctagattttgggccacactccacctcagcccctgaccatactgaattaaatcatgagctctggcaggtctgccctttggaagcaaagaaaacctcacatgacactcgattgagatttaaaaaaaaaaaaaaaatcagggcacatgatccagaaaatgcttaaggaagaactccagccgggaacccacgaggcagatcccccccctcagccaatcagtggtaacgtggatgcttttttcttcttcatgctttattggtcggtgagggcatgaagtgaaattctgccatgacttgataaagctttgctagactaggagaaaagctgatcaaatccagcagaagaataagagagttgggggtggggaggaagacaggtgtttaaggtgagaccagtaaaatatcaattttacacatctcacttgcagaaagaggagattccttggttttctttttgtttgtgtatttgtttgtttgtttgtttgttttgattttgagacaaggtctcatacagcccaggctagccttgaagccataatcttcctgcctcagcctcccaggtgccaatgtcgcaagaatgaggcaggacttctcaacccggtcactgttggcatttggaatgaaatctttgtttgttgagaattggagatcccagcctataggatgtcttacagcatccctccctccccatccctagagagatgccagcagaacacctttccaccgctgtcacaaccagacactgccacaaaaccatctcctggggaaaaccattaagagctcgttatcctgaaacactgaaaacttgtagattctagccaaacgtggtgttgtgcaccgtcgtatttatagatcaatgtgggtggaagagtgtcagccatctcaaagctgtcagactacactcaaagacccgcactttctggccttttgtattccatgcaaaaaaaaaaaaaatctgtgtgagaattgtactgactctcacacacccccagtgaatgcgctgggtctgccctccacagcctgtctcctaccatagcaatgaaagtgtgcttggtgttgtcaaatccactaacttaaagatgccctagtatctctctggaaagtttgacctgaaggtaagtcttaaacccaaaccgcccggcccctctgttcctgagagagatcttctaacaaagctttaggaggtcccaggctacgcacagcccactcgctaacactctcgcccactttccaagaatcacccctacgagtttgacctccactcttctttgccctcactcccttctttggctggtttatctaactttatgatttttactccataaagttagtcagtcacctgctttttaattaaaaaaaaacaaaacaaaactttgctgagcgaccttctttccctaaagtgtcccccgttaaagtttgtatttaataacggaagttgcccacgtcttgacttttttcagatatgacaatggatgatgttcgggaatacgagaaaaacatgcatgaacaaaccaacataaaagtttgcaatcagcactcctccactgtggatgacatagagagccatgcacagaccagtgtatgtagactgttcaaagcgcgttgcccaccctgtgggaaacagacatggaagcccatctgttagcccgtgaaaatgcggggtccccagccttctgtgaaaacagaacctctcccagagaccgtgggtaaaggtgcccccctcccaagtcttcgagtgggctgtgtcagtcacctgggtcttccagatctttccactcttcagtggcttctcttcatggctaacccagtcataaaaagagagtggaaacatttgggggtacctgtcagatggcctgcactaatcacgaagtagcacaggagccacagtgggtgtcagaggtgaagtggatcaaatgcgggacttttcaaggcgtagttggcacttgtactccttgaagggctttgctcttcagctgtcatggtctctgagaggcttttctggaactcttttgggctgttttactcagtcagttccttttgacttaggctaatctacagagtaagctacagtctgtgcacacacgcattcctagtgggggctggtggtgaactgagatttaggggtgctacatagtagatctagcctgagacttacttagcaaaggccttagaaagcccagggttgtttgacagccttgggtttactgaaagctgactatatggtatataccagaaatggaagcctgtatttaaatacatagttatctcttggtcagtgatgctaacaaagaggccctagggataacaaaggactcgtccccaagttggcacataggtctcagccagatctcttacatgtgatctttctcggaacaggatgaattcttgtgtttgccatgcccaggccctagggtaatagtatttattataagatactgggaaactcaagaatgcagtttttacatgactgctacttttgtttttttggttctgttttgttttgcttttctaagaagtgagaatgcagggtctagagacagctcagcagttcagagcacctgcccttgtaggtacccaagttcagttcctagcgcccatatctagtggctcaccactttctggtccggggtatccagtgccctctactgtcctaagtaggcattgattgcatgcatgcacatgtgtatacacacacacacatatacataaacaaatgataaatccattttttaaaaaagaaatgagagcataattacagaactttgagaggtaactgttgtgacaaaggctctagaatcggaagaccttctggtaatgttttggaaatgtttaatcacacacacacacacacacacacacacacagagcatgatttggactgtaccttgccaggctagtgcatgccattggccactggatgcatgtgaccgcctgaaagcggactggctccgccttccccctgtcgtgcacgcggtgattggggtttgcaggaaaccagttgaagcaagagttgctgaaggtttgccccattttgatcgaatacctcccaactctccttttttcctgttctaaagataggaatgttcttttaaggaaactgttccagaacgttccttgctttagattaccttttctcctaggaatgtcaaacccaaagaaagctacaggggagggaagaagggacaagggatgcctgaagggcactgagcaccactgttttcaggatctaaggcagacatggtggctgagagctgaggcaggagaattgccttgagttggaggccagcctgatctataatatgggccaagggggaggtggggtagggacagagcttacagcttaaagcctttgcatgtgttctttccgttttaactcatcattagcgttaaactgtgtagagaaagatgataactcagaatgcacccccaccttttttctggctgtaagaaacccattgtcaccatgattgaagtataatggttatcttataatattgccctctttctttgggataccatgagatcgtggatcatgtgttgtgttgtgttgttgttgttgtttgtttgtttgttttttgcaattgtactttttttttccataatgaaaaaaagatggttaaagctgagaggctgtgtgtaccacaagtaagtagtgtgtggataggccagcaagatggcctatcagggaaagaccctcatcatacaagcttagagacctgagtttgattgccagggcccaggtaactgtggaaagagtgaattggctccacatgtacacagacacacaccctaagaattaaaaatatttttaaaatgtataaatagtaataaagccacataatggggctagggatgtagcaaagtgcttaactatgcagaaccctgggctagatccctaacaccatataaacggtggccgctgtcacaatcccggcactggtgaaatagaggcaggaagatcagagatccaaagttatcctcacctacatactgagttagaggccagcctgatctacccaagagcctatcaaagaaaaagaaaaataattttagcaccttcacgggtgctaaaatgaaatttaaatgatcaccctgaaaatggataagttaagtcggaagtaagcaaaattaacttccgttagcacactaaagaaagaaactaaagaaagaagcagtctcgcttggcaagtgagaggtttcaaagagaagaggagactctgaggggttttggttttggttttttggttttttggttttttgagttttttgggtttttttttttttttttttttaatctaaattctgtgctgtgtcctttctgccccctgctggaaacatacaatatcacaacatttcagcaacttgttaaccaagtcactttttcaaattgctatccatttattaaagatatatcctagttcactaaaattctatgtcgaattccaagcaaatgctgctttaaagaaatgaatctcactcattcacttaaaagtggtaagttaataggtacgagttttcttaaaaccatataaattttatattatgtcaacacaattgtaatttttttttatctcctttataaaaactcttccctttcaggaaattttttaaaatttcatagggaaatggtcacagattcaatttaatgggaagtgggggttttttgtttttgtttttgtttttttgagtctggcatttgatagtgcatgcctttaatccctacacatgggagtcagagacaggtagatctgggttttgcagtcccagagcctggtctacgaagttaccggaccttggggccacacagaacacccccacatacacaaaaagtgtttgttgttttctttgtccagatgttatgaaacccagtggtgtgacttggtggtagagcccctgcctggcatactcggggccctggatttgatccccagccccacaaagaacacctaatgattaacataggttgtcagtgttcatgccacattcaacactgcaaagagacctgaaccactgagaccatggcagagggccagaagaactgaatgagcctgagtaagccaacgtagatacacacaacacacatgcatgcacacacattcatacagacacagacaccacgtacatgacacacctatgcatgcatacacacacacacacacacacaaatatttttaatgcatactaactaggctaatgagatggctcaccaagtaaaggcagccactgctgccgagcctggcaacctgaattcaacccaatgaacccgatcctctctcccccgagactcagccacccacaccacacacagcaaatagatagataaagtgtatttcagtcattccttaatacttactaagagtcctttgaaaactcttgggttaatatccaaaaaaagaaatgttcttttccgggatgtgtcttagtaacacagatgtggggggcaggggagaaaaaaaaatgagggtctaatatttcaaagacatgtcaagtttgtgattgggtaggcatcagcttcatggtagtgtccccagatttagcaataaacccatttgcccgtccgaacagtaactattcttttctccgcttttccctttgaagacatgacaatggatgaagtgcgagagttcgaaagagccactcaggaagccaccaacaagaagattggcgttttcccaccggccatttctatctccagcatcgccctactgccttcctcggtgcgcagcgccccctccagcgccccatccacccctctctccacagatgcgccagaatttctgtccattcccaaagaccggccccggaaaaaatctgctccagagacgctcacacttccagatccggagaaaaaagccaccctgaatttacctggcgtctacacttccgaaaagccatgtcggcccaaatcagagtaactcggtctgaacatccctttgggtcctttgttttcatttgtggctttttttttttttttttttaaagaattctctggacgaggaaaagactgcctccttcactcagatgtgttcttggatctcagacaatgcatgtggttaaataatctcacagatagcaagaacccctacgtgtgccacacagcatcatagtgaatgtgaaaagtatgatttagggaaaacaaaaaacaaaaaaaaaaaacaaaaaaacgaaaggaaacaaaacaggaggggctgaggacaccgctcagtgggtagagctgctacagctactgtggaacccggggttccatcccagccatggtaaccaggcaggaggatcagaagttcagggtcaacctcagctacatacagagtttgaggccagcctgagttatttgagacactgtctcaagaacaatcaaacaaaacccacagaatcttctctagctttagatgtggaccagggaggaagccttgttttgggggctttggtgagtctgatgtggacctcaatggtaaaagggtaaatggatgagaaaacttttttttttttttttggtaaggtgtggtaaattaatgatgtcagtttcctcccatcaaacctgaaattctcaacaacaacaaaaaaaaaaaaaaagaaaaaaaaatactctcaggtgtcacatgcctaattgttctcttttgggactgctgactaccaatacttgaattccagttgttatcaatattcctattttgatttagtctgactcaggatttggagcctgattaacttcttaaatttttgaaaattttaataaccaacttcttgaggctccaagtgcaattaatgataatgtctttataccttttcacaaaatttaataaagcacccatctgtttgcgtctcttcgcttcccctttttgtgccctggtggcttctcaaatcttgcctggatgacttatgaccacaactaatacaatgtggaatattccggaaacagagagccccaggtgagacagacatcttctcttcagggacctgcaaagtttgacttgtgagcttcatccataacgattctcagaaatttcgacaagctaagtagaattcattgacagtctcccacttgaggaaattgaggatagactaagggacccgggtttaactagccagtgtctgaaccacacagaagagaagccacgcctcctggtttactcttaggaacacccagatattcctggaaatggtttgcccatcaccaggctttaggaagcaccaccattctcttaggccttccttataatctaaatatcgggggccagggtgtaactcgattgtagagttcttgcctaacattcaggaggccctgggactgatccataaccctgcaaaaaaggaaataatccagctattgcctgtgtccctggaatccagtaaatacaggcaggcgggaggagtggaatcgcaggctcctatttgtacagaggtgtgatcataaatgtccctttttgtcttgctctcattgctgaatgaaggggacatgtatgccgacagctggtgaggtcagtaggtcatcaaagtggcagaaagagaaatctgtcacccttacacctcactgcctttaaacccacaaggaagggaagcagatagagcaatgcaggtggctggggagctccagagcccatgtcctagctgtcccttcctgactcgtgaccttcaacctcaggaaaggaaatgccccccccccccaatccagatcccaaaggaagcaaaacagaccagggagtatattctccttccctgacacctcccagccggtggaccctgcctgcaccctctcttcagtctccacattctgcaacatctctggggttcacgccctctcccatggcccagatgctggcccctcaagcctagcaccaaagtgtttagagtgtctagatcatttcttgtctatagatggacattgcgccccagtactcaaaggaaagcaattacaagtagattaccataacagcgcatcttttccttaaggtgacagtaccatagtagggtacccttctttgcatggtatggaagcatgaatcttgcttgtgggaaaaccgtaatcttttctcaaaccctttgaactcctcagtggttccctcccccatgcagctgtactcagtgagaatgtctggctttcaaaagcaaaattccactttcagaggacgcggaattcgcgtctgtacctgcttaccatttgcaagctgatgcgggctggggtgggctcctcggttttcgtgtagtacaagttgattttgcgcaggtggctagcccatctggcacctagtttttccagtaacaccacgccactcttcctttctatagccgcttccattgtcaaggtcaacaatctggttcactttcaaaaggctacgttctcattcccttcctgtgagttctctctcctttgtagtcagcccgggacttttgacaccaactgcagcgctaacctatgataatgtgattcttaaccaacgcctatgtgttcagtttttctgtctacatgtggtttgcctgtgttacaaatagggaaggggtgggattctggatatatttcattagctgctttgaatatttaatccagtcatcacaaagcataaatgacttcgatattttctgaaccttgatttccaagtgtcgtttcgctttgtccttatgtgaatctgctattgcgggatccaagcatttgaggaatatgtatatagaacatgagtaattcttgtgaggatggaaacaaaatggatgcatgacggaaatttaggaagaaaaaaaaaaaagcagaacttgaattgctaagcatgtttgagggggaaatagaatccttaactcagtgcctatgtctgccatgtgaaatccttcagctttgtgcaccaaaactgtatcatacctgtacatatatatacatgtataaaaggcagtatagcaagtcacacaccaccagtcctaaatctctggtggtcaaactgaaatagttgcccataggataacacatatgtttacccctcttcatatctgatggtggcagatgccactaaaatggccacatgtgtcttgactccaggtggcttccgaataggaaatatccctgcgatcttggtgtggcatggcagcagcatctctctctctgcgctttcctgggtcaaggttttgtggtgtttttattgtataaagtttgtctgaaaccgcccccaaggagggtttccttttatgctgtagtaagagaaagcaaaggaaaaagaaactgtgacattttttgttgtcagtttgttggtggaccctgttaccatggcttcacatctaagtggggactattttaacttatttacaggtatatggtgtggaaataagttagctcaattgtggatataatgaacatccacacacagacacatacacacacacatacaaataaataaaaatttaaaagtaaaatacacaacctcatgctaaaactagtcatgtggtttttctttcatggctcataacaaactttaagaggcattttgataagaactctcttcagtgctctgagacaacagggtaacaggacaccagctggcttagatcgatgggaactttgcttttgaaaagggccagcatatagttaattgattatacttttgatctataagcaaataatccaatggagagtgactctctaaatagtttccaaacttttctggtcacctgactagtaggctagatgacattctgccatctaagccatagctgtaaaaaaataaaataaaaatataaatcctggcctgtgctataagttgacatgaataaagtatattaagctctttattcttggtgagaccaaagtgtggcactgtgttgacaccatgggcagacacaggacaccttgggttcttctgtattccaccttcaaagcggtctgtctgagtatgatatcttactgctcaagatccacaggacttcacgatgtaagagggtgtgacttcatggagaacctcacagtccatgtcccttcactgtaaccccattttaatgaatgcttagactaagcctccccaccttcttgcttttcgagttcaaactgtatctgcagaatttcaagtctcccgttcggtttcccagtgtccctgagaagagaagaggttcttttctacgcccttgccagtgtcatttcagtgtttacattttcgagctgagaccttgatcggctaacttagtcaaaataccactgccaccgctgaaggaccaggtgttcgaatgcacagtgttgcaagcaacgcaagcgaaagtgaccctcacacacacagccctctgtgtccttttatggctgttctgtcgtcgatgccaacccccaattatttattattgttaataacttactttttcttacattctgttgtaaataaagtatgaagcaatcttcttccgagtgtagcatcctctgtctcagccagtttcaagggaacgctggccactgttaacatcagtgggaaagaagacagaagtcccaattgctgtacccagctggatgacctgatgtgcaagaatgcctctcctaccaatggccatatggtatcttacatccctttgtaggaaattcccagtgaccttagttttccagtctaaaaatatccaaaagaaaacctataaccccaaagactgaatgcatagactgccttttccacctagcccctacttgaatgtccctggagtttgagattacatagccgacaggaatccttgggagtgccaaccagattctctccaagccaggttaagagtcgtgcgtgagggctggcgagatggctcagtggttaagagcacagactgctcttctgaaggtcctgagttcaaatcccagcaaccacatggtggctcacaaccatccataatgagatctgataccctcttctggagtgtctgaagacagctacagtgtacttacatataacaataaataaatcttaaaaaaaaaaaagaaagaaattacatttccgttaaaaaaaaaaaaaaggtgttcgtgagctgggcgcatggtggaccacgcctttaatcccagcacttgggaggcagaggcaggcagatttctgagttcgaggccagcctggtctaaagattccaggacagccagggctacacagagaaaccctgtctcgaaaaaccaaaaaaaaaaaaaaggacaaagtctcaagtgcttatctccttgtacttcttgtacttgtaatgtggctgaagatgaccttgaaattacaatcttggtgcatcaaccttccaagttctgggattcaagtgtgtacccgctgctagcagaatactccttccaggtagctaggataagcccacacccacagtgacacacctactccaacagggccacaccttctaatagtgccactccctgggcagagcatatataaactatcagaacaacccttagtctatctttcagttaatgcttgggctggcaggctgactaggtgggcctgagtatttgctgccttgtctaatgactgaagattgcccctaggactcacatggaagaagaagaagaccaactctcaaaagttgtcctctgacctcaacacaggtcccatggtgtgtgaactgcaaatgaatactccggttgtcctagcaaagctatcaaagcctctggctgactggcaatttcatgaatggctattgcagacctagaatgtatcctgaacttgagaccagggtacaactggaaatccgtgggtgttcagagggctaaggttaggcctcagtgggaaggtgcttttgatgnnnnnnnnnnnnnnnnnnnnnnnnnnnnnnnnnnnnnnnnnnnnnnnnnnnnnnnnnnnnnnnnnnnnnnnnttcacccattacacccattacaccccatccagccttttaattctgtattcaaaacacacaaacttcccacacagctgctggctggctttcttgggcagaggctgcctcctggggctgaactttatggggttgtaaaatatttacatacctaatcctcaatgcataggtttttgtgactcctccgagttcctaagcagctttccatcaaaagcaccttcccactgaggcctaaccttagccctctgaacacccacggatttccagttgtaccctggtctcaagttcaggatacattctaggtctgcaatagccattcatgaaattgccagtcagccagaggctttgatagctttgctaggacaaccggagtattcatctgcactggggtgtggtgggtccagcaagctctttttttaaggttacagattgactctttgtgcctaacttgtctacacttacattctctctcttccatcctgtgtgacttaatagactacttcattcaaactcaatgagagagagttcctgggagagttggtgctctagtttgttgtctgttgctatgataaacaagagcttaatgtttctactgctacagtgaaacaccatagccagaaagcaagatgtggagaaaagggtttatttggcttaaacttccacggcactgttcatcattgaagagcgtcatggcaggaaactggaaccaggagctgatgcagaggccacggaggggtgctacttgctacttacagacttgctccacatggcttgctcaaccttctttaaaaaaaaaaaaaaagacttatttattttttatatgtaagtacactgttgctgtcttcagacacagcagaagagggcatcagatcccattacagatggttgtgctgggatttgaactcaggacctttggaagagcagttggtgctcttaaccactgagccatctctccagtcctcagcctgctttcttacagagcccaggaccaccaggcgaggaacagcatcacccacagtcccccaccaatcactaattaagaaaatgacttacagccagatctaatggagacattttcttacttggggttcccacttctccaatgactccagctcgcatcacgttgacatcaaactatccagcgtactgaccaaaaacaacttagggaggagagggtttctttcaggtaacaacatatcatagttcatcactgagggaagctgcccgtgaccagcctggacttgaagaggagttcctgaggaaggggtgttaggagaggggaaagaaggactcgaagtcaatcatgggtataagctggcagctctgtgttctgctcctgctggctttccagacagctgggtagataacccttgcagaccaaagcccagtcctttatttacatatcagttcaatcattacccggggttcccttttgattatcccacaaatcaacgttttatgaccttagcccctcgatacttagaaagagctatcaagcacattttctttcttttacatagcaaataaatccagagatctgcctgccattgtaagcacaaacaatacgtttagtacgtttagctggataggaccacacacacacacacacacacacacttttttttttatttctgtgtatggaaatgtgcatgtgtgagtccagcttgcatgtttggagccccaaaaaggttgttagctgccagatgtgggtgctgcaaactgaactcaggtcctttagaagagcagcaagtgctcttaactgctgcgccatctctccagcccctcagctgactttctcttacagtctgacccttctgtccagggatggcaccacccacagttggataggccattcctacaacaattagcaagcaagaaaatgtcccacagacatacctacagatcaatctgaaaaaggcagttgagatcccttcttcccagatatgttgaagtttgatcaaactgataataaactagtgatgttaggtataggtcaataatttgccttaatgttcttgctctgttcccatcatgtgagccaaaaacaaaaaaacaaaaaaaaaaaaagaaagaaagaaagaaagaaaaggaaggaaggaaggaaagaaagaaggagcaaaggaagagacccagggatgtagctcagtgagtagcatgcttggatagcttataggaagccttagcttcaatgcccactaccacataaatcaggtgtagtgctacaccccgtgtagttctagcagtgggaaggtggaggcaggaatatgtcttagtcagtcttctattgctgtgaagagacatcataatcagggcaactcttttttgtttgtttgttttttcgagacagggtttctctgtataaccctgactgtcctggaactcactccgtagaccaggctggcctagaactcagaaatccacctgcctctgcctcccgagtgctgggattaaaggcgtgtgccaccactgcccggctacagggcaactctcgtaaaggaaaacatttaactggggctgggttagagcttcagaagtttagtccattgtcattgtgactgggaccatggaggcacgcaggcaggcagtgttggaggagtagctgagaggtctatatccggttgggcagacagcaggaagagagagagagagagagagagagagagagagagagagaacactacctggttcaccttgggcttctgaaacctcaaaccccactcccagtgacgtacctcctccatcaagtctgaacctcctaatctttatcctttcaaatattgctgctccttatgaacctacgggaccattttcactcaaaccaccacagattagaagatgaactatgggggctggagagttggctcagtttggggttgaaagcccttggctcaagcccttgttgctcttacagaggacctggtctgattctcactcagtacatacatgaaagctaacaaccacctgtaactccagtcatgaaggatctaatgcccatttctcacctccaagggcactgcatacacgtaattcacagacagaaatgcagacaaaacaactattacacataaattttttttttaaaaatcagtcttggttacatggtcagtttgaaggctaaaaataaaatatcggtaacttccagggttgcactgaatagcctgaactaagggttgaattataagcacttgggatttaagggatagttttgtttaactgtaaaaaccagttctggagccagaggatggttcagcagcaaaagggacttccactgagcctgacaatctgagctcagactccaggacccacgtgactgaaggcaagaactgagctctgcaagttcttctctgccctgtagactgatacagcgatgagtgtgcaacacacacacacacacacaaagtagaagaaactttttctctctactcccctccagacagggtttttctaatccgtgtagccctggctgtcctgaaacttgctctgtagacctcaaactcagagatcactctccctctgcctccccagtgctgggattaaaggtgtgtgccaccacacccagctgatacgccttttttttttttaataccaatcatgtgccactaaggcagatgcaaaagacttgtaatttttctttacttctcctcttacccagctaaagtcctttgcttttaaatgtccagtcggtggccactaatctgcttgcacatcttccctgcagctggggtatctccacccttcagtgttcctggtgtaacccacttgagccttagactttgaagccagtgtgataaacacctttgttacggagccagcccctgactttaacttcttgctaggaagttaaatcctcagactgtctacagcaaaggataaccctgaagtcccgatcctcctgcctccacctccccagggctagtgtcaggactatagtcagtcaccaccatgcttagttttatgcagtgctgggaatctagcacatgcttggtgcttgctaggtaaggatgtgacaacggagtcactgccccaggcctccagtcttctctcagaaagcatgatgggagttataacttctggaacacacacacacccgccccctccctctgtctcccccccccccaaccagagcgtctcctaacagctctggatgatagagcttgctctcggttttgcctgtggattgctgctcttggcctgatcctcagattctctccctttaacttgtcttgtcctttttgttggccaacttgcctgtatctttgtccttcttgttgcctttggacagcattgccacactcagagaacggcgtccactacggcagcctcacgaagaaaatggctgtacctccttaaacttcacgaagacagttttagccactgtctctggaggggggttgagggcagacaactctgggtgattttaaaatcttatcccaaaataaatttcccactccctggggatggtctccgtgagatgctggcggctgactacacacaggcgacccttgagagtcaagttgtacggcacacaagcagtcctgttctgagagcttccaaagatagctcacagctccagggcacagaacgcagataaagtcactcatggggccagatgtgttctttgccttttctctgaacggtccttggaaacttggcaagatttcttttgatttgaattttcccactgtcatgttgaagttattctattcctttgcattctgagataattaataattataatataatcttgaggagatgaaaaaatcaccattgttagatattttaggatttaattttttttttttttagtgtgagtatgcttgcgatcatgcacattcactcacgtgcccatgcacacatgcacatgtatgcatttgggtgccaaaagaggagatgaagctgcaggtgactgtaagttacacagtcagcactggccactcaagtcctctgcaatggcatcaatcgttcttaactgctgagccacctctccagttccaatttttttaaattaatttttaaggaaaattttaacatgtatgaacatttttgcctgtgtgcatatctgtgccccacatgttagctgggcgctcataaaggtcagaagatgttggatcccctggatctagagctataggtggttgtgagccaccactaggtgcaaggtccatacagatgctcttgggaactggagaggtggctcagctgttaagagcactgctgctcatccagaggacctgggttcaattctcagcacccacataatggttcacaactgtctgtaactccattccagagaatctgacaccttcttctggtctcctcagataccaggtacacatgtgggcatacatgtcagacatacatgtaggcaaaacacccatacacataaaattcaagtaaattgaaagaacctaatggggaaaccccactcaactcccgattcggtgtgcacccaagaatcatgaacagactgtcttgatgtaaatacatgaggtagtttaatggcggagctctgggtcaaaacatatctcatgcaggagacagtggatttgaccccaggcttagaagctaggggtttttatagaaaaggggctggggctgggggaggaattggcgtggtttcacatgattggtccatttaaatatcagcagactgtatatgcagataacatttaacttaggtcagaagggcgggagatagggaggcactgggccagtccagcatgtcattctctttatctttatggctaagcagcctcaggaatgtcttaacaacgggcctgcccgggcatgtcctggcctgttctgctatgctctcagccccaggtttcaaagctcacaaacaactctttgggctatttgacataaattacatgaatcacaggtctcaagttttattttctttcaaaataagtctttttaaaacacatgatagctgggtggtggtgcatatctttaatcccagcacttgggaggcagaggcaggcggatctctgtgagttcaaggacaacctggtctacagaattagttctaggatagtcagggctacacagagaaatcctgtctttaaaaactgacaagtgcattctttttgtccactgaaccatctttcagcctctatttaatttttcaagatttatttattattatacataagtacaccatagctgacttcagacacaccagaagagggcgtcagatctcattaagggtggttgtgagctaccatatggttgctgggatttgaactcataaactttgaaagaaagtgctctaaacactgcttatcattttttaaggctaaataatatattccctacagttgaaaatctatgattgtctacaatacttattatggtttagcatttgggtttttttttttttcatggatttttgtcttttatgtagagtgttgttacaaacctattttaacacagtttatatcctttgtgttgttgttcagtcctgggggttgaacctatgatgcccacatgccagtcaactcactaaggtatatacccattcctctttttttttttttaattttgagacaatatctcattaaggtgctgaggctagccctgaactcactctgaacacaagaaggccctgagcttgccattcttctgcctcagccacctaaggagctggtatcatatgttggaccaccagccctggcttatgtcttctattcatttatttgtcttagataaattctcagaaattggggctgaagagatggctcagcagttaagaacacagatggctctcctgactcctaaggcacctgagctcacgtgcacatacacatgcacatacttatagatacatacatatacaccacacacatgcacatacccccatttgcacacccctttcacatatgtacacacacacacgtacatatacacacacacatgtagaacatggtatataagtgagttgcactgaaaaacatggaaaatgataaaaaaaacagtgtagaacattgtatgtgagcgagttacaatgaaaaacatggaaaatgagaaaaatcacactgtagaacatggtatatgagtgagttacaatgaaaaacacagaaaatgagaaacgcatggtgtagaacatggtatataagtgaattacaatgaaaaacattgaaaatgagaaaggcacactgtagaacttcgtatatgagtgagttgcactgaaaaatatagaaaatgagaaatgcacattgtagaacatagtatatgagtgagttgaaatgaggaacatggaaattgagaaacacacactgtagaacatgttatatgagtgagttgcactgaaaaacatggaaaatgagaaacgcactgtagaatatggtacatgagcgtgttacaatgaaaaacattgaaaatgagaaacgcacagtttagaacatggtacatgagtgagttgcactgaaaaacatggaaaatgagaaatgcacattgtagcacagtatatgagtgagttgcactgaaaaacatggaaaaatgagaaatgcacattgtagaacatggtatattagtgagttgcaattaaaaacagaaaatgagaaacgcacactgtaaaacatggtatatgagtgagttgtactgaaaaacatggaaaatgagaaacgcacactgtagaacatcgtatatgagcgagttacaatgaaaaacacagaaaatgagaaatgcacattgtagaacatggtatataagtcagttgcactgcaaaacattgaaaatgagaaatacacagtgtagaacattgtatgtgagcgagttacaatgaaaaacatggaaaatgagaaacgcacactgtagaacatcgtatatgagtgagttgcactgaaaaccatggaaaatgagaaacgcacactgtagaacatgctatatgagcgagttaccaatgaaaaacagagnnnnnnnnnnnnnnnnnnnnataggtggaacaacaatatgaactaaccagtaccccggagctcttgtctctagctgcatatgcatcaaaagatggcctagtcggccatcactgcaaagagaggcccattggacttgccacctttagatgccccagtacaggggaacgccagggccaaaaagggggagtgggtgggtaggggattgggggggtggatatgggggacctttgggatagcattgaaaatgtaaacgaggaaaatacctaatttaaaaaaattaaaaaaaaaaaaaccaacatgggctggtgagatggctcatcggttaagagcactgactgcgcttccagaggtcctgagttcaaatcccagcaaccacatggtggctcacaagcatccttaatgagatctgaagacagctacagtgtacatacatataataaataaataaaatctttaaaaaaaaaaccaaacgaacaaacaaacaacctcaaacccccaaaacaaaacaggttgggggggggggtgaaaatcccagcactcgggaggcagaggcaggtggatttctgagttcgaggccagcctggtctacagagtgagttccaggacagccagggctacacagagaaaccctgtctcgaaaaaccaaaaagaaaag

SEQ ID NO: 1464 - DNA, 5561 bp, Mus musculus
caaagctttcccctaaggagtgagaaatgggactgctcttcagtacaaaatcggacagctgtatatgatcagcaaacacagccatgagcagagtgaccggggagaaggggtagaggtcgtgcagaacgagccctttgaggaccctcaccatggcaacgggcagttcactgagaagcgagtgtatctcaacagcaagctgcctagttgggccagagctgttgttcccaaaatattttatgtgaccgagaaggcgtggaattattacccatacaccatcacagaatacacttgttccttcctgccgaaattctccatccacatagaaaccaagtatgaagacaacaagggaagcaacgatagtatttttgacagtgaagccaaagacctcgagagagaagtgtgcttcatcgatatcgcctgtgatgaaattccagaacgctactacaaagagtctgaggatcctaaacacttcaagtctgagaagacaggccgagggcagctaagagaaggctggcgagacaaccatcaacccatcatgtgctcctacaagctggtcaccgtcaagttcgaggtgtggggccttcagacccgagtggaacaatttgtgcacaaggtggtccgagacatcttgctgattggacacagacaggcctttgcgtgggttgatgagtggtacgatatgacaatggatgatgttcgggaatacgagaaaaacatgcatgaacaaaccaacataaaagtttgcaatcagcactcctccactgtggatgacatagagagccatgcacagaccagtacatgacaatggatgaagtgcgagagttcgaaagagccactcaggaagccaccaacaagaagattggcgttttcccaccggccatttctatctccagcatcgccctactgccttcctcggtgcgcagcgccccctccagcgccccatccacccctctctccacagatgcgccagaatttctgtccattcccaaagaccggccccggaaaaaatctgctccagagacgctcacacttccagatccggagaaaaaagccaccctgaatttacctggcgtctacacttccgaaaagccatgtcggcccaaatcagagtaactcggtctgaacatccctttgggtcctttgttttcatttgtggctttttttttttttttttttaaagaattctctggacgaggaaaagactgcctccttcactcagatgtgttcttggatctcagacaatgcatgtggttaaataatctcacagatagcaagaacccctacgtgtgccacacagcatcatagtgaatgtgaaaagtatgatttagggaaaacaaaaaacaaaaaaaaaaaacaaaaaaacgaaaggaaacaaaacaggaggggctgaggacaccgctcagtgggtagagctgctacagctactgtggaacccggggttccatcccagccatggtaaccaggcaggaggatcagaagttcagggtcaacctcagctacatacagagtttgaggccagcctgagttatttgagacactgtctcaagaacaatcaaacaaaacccacagaatcttctctagctttagatgtggaccagggaggaagccttgttttgggggctttggtgagtctgatgtggacctcaatggtaaaagggtaaatggatgagaaaacttttttttttttttttggtaaggtgtggtaaattaatgatgtcagtttcctcccatcaaacctgaaattctcaacaacaacaaaaaaaaaaaaaaagaaaaaaaaatactctcaggtgtcacatgcctaattgttctcttttgggactgctgactaccaatacttgaattccagttgttatcaatattcctattttgatttagtctgactcaggatttggagcctgattaacttcttaaatttttgaaaattttaataaccaacttcttgaggctccaagtgcaattaatgataatgtctttataccttttcacaaaatttaataaagcacccatctgtttgcgtctcttcgcttcccctttttgtgccctggtggcttctcaaatcttgcctggatgacttatgaccacaactaatacaatgtggaatattccggaaacagagagccccaggtgagacagacatcttctcttcagggacctgcaaagtttgacttgtgagcttcatccataacgattctcagaaatttcgacaagctaagtagaattcattgacagtctcccacttgaggaaattgaggatagactaagggacccgggtttaactagccagtgtctgaaccacacagaagagaagccacgcctcctggtttactcttaggaacacccagatattcctggaaatggtttgcccatcaccaggctttaggaagcaccaccattctcttaggccttccttataatctaaatatcgggggccagggtgtaactcgattgtagagttcttgcctaacattcaggaggccctgggactgatccataaccctgcaaaaaaggaaataatccagctattgcctgtgtccctggaatccagtaaatacaggcaggcgggaggagtggaatcgcaggctcctatttgtacagaggtgtgatcataaatgtccctttttgtcttgctctcattgctgaatgaaggggacatgtatgccgacagctggtgaggtcagtaggtcatcaaagtggcagaaagagaaatctgtcacccttacacctcactgcctttaaacccacaaggaagggaagcagatagagcaatgcaggtggctggggagctccagagcccatgtcctagctgtcccttcctgactcgtgaccttcaacctcaggaaaggaaatgccccccccccccaatccagatcccaaaggaagcaaaacagaccagggagtatattctccttccctgacacctcccagccggtggaccctgcctgcaccctctcttcagtctccacattctgcaacatctctggggttcacgccctctcccatggcccagatgctggcccctcaagcctagcaccaaagtgtttagagtgtctagatcatttcttgtctatagatggacattgcgccccagtactcaaaggaaagcaattacaagtagattaccataacagcgcatcttttccttaaggtgacagtaccatagtagggtacccttctttgcatggtatggaagcatgaatcttgcttgtgggaaaaccgtaatcttttctcaaaccctttgaactcctcagtggttccctcccccatgcagctgtactcagtgagaatgtctggctttcaaaagcaaaattccactttcagaggacgcggaattcgcgtctgtacctgcttaccatttgcaagctgatgcgggctggggtgggctcctcggttttcgtgtagtacaagttgattttgcgcaggtggctagcccatctggcacctagtttttccagtaacaccacgccactcttcctttctatagccgcttccattgtcaaggtcaacaatctggttcactttcaaaaggctacgttctcattcccttcctgtgagttctctctcctttgtagtcagcccgggacttttgacaccaactgcagcgctaacctatgataatgtgattcttaaccaacgcctatgtgttcagtttttctgtctacatgtggtttgcctgtgttacaaatagggaaggggtgggattctggatatatttcattagctgctttgaatatttaatccagtcatcacaaagcataaatgacttcgatattttctgaaccttgatttccaagtgtcgtttcgctttgtccttatgtgaatctgctattgcgggatccaagcatttgaggaatatgtatatagaacatgagtaattcttgtgaggatggaaacaaaatggatgcatgacggaaatttaggaagaaaaaaaaaaaagcagaacttgaattgctaagcatgtttgagggggaaatagaatccttaactcagtgcctatgtctgccatgtgaaatccttcagctttgtgcaccaaaactgtatcatacctgtacatatatatacatgtataaaaggcagtatagcaagtcacacaccaccagtcctaaatctctggtggtcaaactgaaatagttgcccataggataacacatatgtttacccctcttcatatctgatggtggcagatgccactaaaatggccacatgtgtcttgactccaggtggcttccgaataggaaatatccctgcgatcttggtgtggcatggcagcagcatctctctctctgcgctttcctgggtcaaggttttgtggtgtttttattgtataaagtttgtctgaaaccgcccccaaggagggtttccttttatgctgtagtaagagaaagcaaaggaaaaagaaactgtgacattttttgttgtcagtttgttggtggaccctgttaccatggcttcacatctaagtggggactattttaacttatttacaggtatatggtgtggaaataagttagctcaattgtggatataatgaacatccacacacagacacatacacacacacatacaaataaataaaaatttaaaagtaaaatacacaacctcatgctaaaactagtcatgtggtttttctttcatggctcataacaaactttaagaggcattttgataagaactctcttcagtgctctgagacaacagggtaacaggacaccagctggcttagatcgatgggaactttgcttttgaaaagggccagcatatagttaattgattatacttttgatctataagcaaataatccaatggagagtgactctctaaatagtttccaaacttttctggtcacctgactagtaggctagatgacattctgccatctaagccatagctgtaaaaaaataaaataaaaatataaatcctggcctgtgctataagttgacatgaataaagtatattaagctctttattcttggtgagaccaaagtgtggcactgtgttgacaccatgggcagacacaggacaccttgggttcttctgtattccaccttcaaagcggtctgtctgagtatgatatcttactgctcaagatccacaggacttcacgatgtaagagggtgtgacttcatggagaacctcacagtccatgtcccttcactgtaaccccattttaatgaatgcttagactaagcctccccaccttcttgcttttcgagttcaaactgtatctgcagaatttcaagtctcccgttcggtttcccagtgtccctgagaagagaagaggttcttttctacgcccttgccagtgtcatttcagtgtttacattttcgagctgagaccttgatcggctaacttagtcaaaataccactgccaccgctgaaggaccaggtgttcgaatgcacagtgttgcaagcaacgcaagcgaaagtgaccctcacacacacagccctctgtgtccttttatggctgttctgtcgtcgatgccaacccccaattatttattattgttaataacttactttttcttacattctgttgtaaataaagtatgaagcaatcttc

SEQ ID NO: 1465 - protein, 245 aa, Mus musculus
MISKHSHEQSDRGEGVEVVQNEPFEDPHHGNGQFTEKRVYLNSKLPSWARAVVPKIFYVTEKAWNYYPYTITEYTCSFLPKFSIHIETKYEDNKGSNDSIFDSEAKDLEREVCFIDIACDEIPERYYKESEDPKHFKSEKTGRGQLREGWRDNHQPIMCSYKLVTVKFEVWGLQTRVEQFVHKVVRDILLIGHRQAFAWVDEWYDMTMDDVREYEKNMHEQTNIKVCNQHSSTVDDIESHAQTST

SEQ ID NO: 1466 - DNA, 6089 bp, Mus musculus
ttggcggctgcggcttcccttttctctctcagctgagctccggagagactcggggactggccctaaaaaagagcaggaaatcttgtttaccgcccggggagaggagcccatcgagcctttgtttggaaagtcagcatcgcctgctcccgcggcaatgtgttcctggtgacattaacccacggtagacgggtaggagaaaaagggggctcgccaggttcagctctgctttcggaggaggatccagaggagacttttgtgcgtttgtttgaatttgtggaaatcccttttcctcctccttttgcctctcttgcccgccgccgggcatgtcctgatctggtggccgcgcctaccagcccggggctgctgatccgagctgtctcccgcgggtctccctccctcagtgcctgactttgcaataccgagagggctgatctctgcgaggaaggaggcgggggagtcacagacaccgggacccgaagcttgacatgctccggggcggaccggaggcagttaggagctgagcgcaccaccggggctgcttcgcttgccggttcccagcgtctttgccctcctctgggctccagccttgctcatctgttgggacgcccccttctttcccgaggtctgcggccggcaggaacatgctgctcaaggagtaccgaatctgcatgccgctcaccgtggacgagtacaaaatcggacagctgtatatgatcagcaaacacagccatgagcagagtgaccggggagaaggggtagaggtcgtgcagaacgagccctttgaggaccctcaccatggcaacgggcagttcactgagaagcgagtgtatctcaacagcaagctgcctagttgggccagagctgttgttcccaaaatattttatgtgaccgagaaggcgtggaattattacccatacaccatcacagaatacacttgttccttcctgccgaaattctccatccacatagaaaccaagtatgaagacaacaagggaagcaacgatagtatttttgacagtgaagccaaagacctcgagagagaagtgtgcttcatcgatatcgcctgtgatgaaattccagaacgctactacaaagagtctgaggatcctaaacacttcaagtctgagaagacaggccgagggcagctaagagaaggctggcgagacaaccatcaacccatcatgtgctcctacaagctggtcaccgtcaagttcgaggtgtggggccttcagacccgagtggaacaatttgtgcacaaggtggtccgagacatcttgctgattggacacagacaggcctttgcgtgggttgatgagtggtacgacatgacaatggatgaagtgcgagagttcgaaagagccactcaggaagccaccaacaagaagattggcgttttcccaccggccatttctatctccagcatcgccctactgccttcctcggtgcgcagcgccccctccagcgccccatccacccctctctccacagatgcgccagaatttctgtccattcccaaagaccggccccggaaaaaatctgctccagagacgctcacacttccagatccggagaaaaaagccaccctgaatttacctggcgtctacacttccgaaaagccatgtcggcccaaatcagagtaactcggtctgaacatccctttgggtcctttgttttcatttgtggctttttttttttttttttttaaagaattctctggacgaggaaaagactgcctccttcactcagatgtgttcttggatctcagacaatgcatgtggttaaataatctcacagatagcaagaacccctacgtgtgccacacagcatcatagtgaatgtgaaaagtatgatttagggaaaacaaaaaacaaaaaaaaaaaacaaaaaaacgaaaggaaacaaaacaggaggggctgaggacaccgctcagtgggtagagctgctacagctactgtggaacccggggttccatcccagccatggtaaccaggcaggaggatcagaagttcagggtcaacctcagctacatacagagtttgaggccagcctgagttatttgagacactgtctcaagaacaatcaaacaaaacccacagaatcttctctagctttagatgtggaccagggaggaagccttgttttgggggctttggtgagtctgatgtggacctcaatggtaaaagggtaaatggatgagaaaacttttttttttttttttggtaaggtgtggtaaattaatgatgtcagtttcctcccatcaaacctgaaattctcaacaacaacaaaaaaaaaaaaaaagaaaaaaaaatactctcaggtgtcacatgcctaattgttctcttttgggactgctgactaccaatacttgaattccagttgttatcaatattcctattttgatttagtctgactcaggatttggagcctgattaacttcttaaatttttgaaaattttaataaccaacttcttgaggctccaagtgcaattaatgataatgtctttataccttttcacaaaatttaataaagcacccatctgtttgcgtctcttcgcttcccctttttgtgccctggtggcttctcaaatcttgcctggatgacttatgaccacaactaatacaatgtggaatattccggaaacagagagccccaggtgagacagacatcttctcttcagggacctgcaaagtttgacttgtgagcttcatccataacgattctcagaaatttcgacaagctaagtagaattcattgacagtctcccacttgaggaaattgaggatagactaagggacccgggtttaactagccagtgtctgaaccacacagaagagaagccacgcctcctggtttactcttaggaacacccagatattcctggaaatggtttgcccatcaccaggctttaggaagcaccaccattctcttaggccttccttataatctaaatatcgggggccagggtgtaactcgattgtagagttcttgcctaacattcaggaggccctgggactgatccataaccctgcaaaaaaggaaataatccagctattgcctgtgtccctggaatccagtaaatacaggcaggcgggaggagtggaatcgcaggctcctatttgtacagaggtgtgatcataaatgtccctttttgtcttgctctcattgctgaatgaaggggacatgtatgccgacagctggtgaggtcagtaggtcatcaaagtggcagaaagagaaatctgtcacccttacacctcactgcctttaaacccacaaggaagggaagcagatagagcaatgcaggtggctggggagctccagagcccatgtcctagctgtcccttcctgactcgtgaccttcaacctcaggaaaggaaatgccccccccccccaatccagatcccaaaggaagcaaaacagaccagggagtatattctccttccctgacacctcccagccggtggaccctgcctgcaccctctcttcagtctccacattctgcaacatctctggggttcacgccctctcccatggcccagatgctggcccctcaagcctagcaccaaagtgtttagagtgtctagatcatttcttgtctatagatggacattgcgccccagtactcaaaggaaagcaattacaagtagattaccataacagcgcatcttttccttaaggtgacagtaccatagtagggtacccttctttgcatggtatggaagcatgaatcttgcttgtgggaaaaccgtaatcttttctcaaaccctttgaactcctcagtggttccctcccccatgcagctgtactcagtgagaatgtctggctttcaaaagcaaaattccactttcagaggacgcggaattcgcgtctgtacctgcttaccatttgcaagctgatgcgggctggggtgggctcctcggttttcgtgtagtacaagttgattttgcgcaggtggctagcccatctggcacctagtttttccagtaacaccacgccactcttcctttctatagccgcttccattgtcaaggtcaacaatctggttcactttcaaaaggctacgttctcattcccttcctgtgagttctctctcctttgtagtcagcccgggacttttgacaccaactgcagcgctaacctatgataatgtgattcttaaccaacgcctatgtgttcagtttttctgtctacatgtggtttgcctgtgttacaaatagggaaggggtgggattctggatatatttcattagctgctttgaatatttaatccagtcatcacaaagcataaatgacttcgatattttctgaaccttgatttccaagtgtcgtttcgctttgtccttatgtgaatctgctattgcgggatccaagcatttgaggaatatgtatatagaacatgagtaattcttgtgaggatggaaacaaaatggatgcatgacggaaatttaggaagaaaaaaaaaaaagcagaacttgaattgctaagcatgtttgagggggaaatagaatccttaactcagtgcctatgtctgccatgtgaaatccttcagctttgtgcaccaaaactgtatcatacctgtacatatatatacatgtataaaaggcagtatagcaagtcacacaccaccagtcctaaatctctggtggtcaaactgaaatagttgcccataggataacacatatgtttacccctcttcatatctgatggtggcagatgccactaaaatggccacatgtgtcttgactccaggtggcttccgaataggaaatatccctgcgatcttggtgtggcatggcagcagcatctctctctctgcgctttcctgggtcaaggttttgtggtgtttttattgtataaagtttgtctgaaaccgcccccaaggagggtttccttttatgctgtagtaagagaaagcaaaggaaaaagaaactgtgacattttttgttgtcagtttgttggtggaccctgttaccatggcttcacatctaagtggggactattttaacttatttacaggtatatggtgtggaaataagttagctcaattgtggatataatgaacatccacacacagacacatacacacacacatacaaataaataaaaatttaaaagtaaaatacacaacctcatgctaaaactagtcatgtggtttttctttcatggctcataacaaactttaagaggcattttgataagaactctcttcagtgctctgagacaacagggtaacaggacaccagctggcttagatcgatgggaactttgcttttgaaaagggccagcatatagttaattgattatacttttgatctataagcaaataatccaatggagagtgactctctaaatagtttccaaacttttctggtcacctgactagtaggctagatgacattctgccatctaagccatagctgtaaaaaaataaaataaaaatataaatcctggcctgtgctataagttgacatgaataaagtatattaagctctttattcttggtgagaccaaagtgtggcactgtgttgacaccatgggcagacacaggacaccttgggttcttctgtattccaccttcaaagcggtctgtctgagtatgatatcttactgctcaagatccacaggacttcacgatgtaagagggtgtgacttcatggagaacctcacagtccatgtcccttcactgtaaccccattttaatgaatgcttagactaagcctccccaccttcttgcttttcgagttcaaactgtatctgcagaatttcaagtctcccgttcggtttcccagtgtccctgagaagagaagaggttcttttctacgcccttgccagtgtcatttcagtgtttacattttcgagctgagaccttgatcggctaacttagtcaaaataccactgccaccgctgaaggaccaggtgttcgaatgcacagtgttgcaagcaacgcaagcgaaagtgaccctcacacacacagccctctgtgtccttttatggctgttctgtcgtcgatgccaacccccaattatttattattgttaataacttactttttcttacattctgttgtaaataaagtatgaagcaatcttct

SEQ ID NO: 1467 - protein, 332 aa, Mus musculus
MLLKEYRICMPLTVDEYKIGQLYMISKHSHEQSDRGEGVEVVQNEPFEDPHHGNGQFTEKRVYLNSKLPSWARAVVPKIFYVTEKAWNYYPYTITEYTCSFLPKFSIHIETKYEDNKGSNDSIFDSEAKDLEREVCFIDIACDEIPERYYKESEDPKHFKSEKTGRGQLREGWRDNHQPIMCSYKLVTVKFEVWGLQTRVEQFVHKVVRDILLIGHRQAFAWVDEWYDMTMDEVREFERATQEATNKKIGVFPPAISISSIALLPSSVRSAPSSAPSTPLSTDAPEFLSIPKDRPRKKSAPETLTLPDPEKKATLNLPGVYTSEKPCRPKSE

SEQ ID NO: 1468 - DNA, 339377 bp, Homo sapiens
  misc_feature (1)...(339377): n = A,T,C or G
ataccatgctggtccctagaaaatagcttgagatcttaaaaaagcttaggatccttgaaaatgggaatgaggccgggcgcggtggctcacgcctgtaatcccagccctttgggaggctgaggcgggcggatcatgaggtcaggagatcgagaccatcgtggctaacacggtgaaaccccgtctctactaaaaatacaaaaaattagccgggcgtggtggcgggcacctgtagtcccaactactcgggaggctgaggcaggagaatggcgtgaacccaggaggcgaagcttgcagtgagccggcgagattgcgccactgcactccagcctgggcgacagagcaagactccgtctcaaaaaaaaaaaaaaaaaagaaaaagaaaagtaaagaaaatgggaatgaggttgtgtttggtgtgggcatatggtcaacagcagcctggaaagcaaacaggaaaacgggaaatcttggagtggtttatctattatgttagtggttctcaatttaattagtgccgacatcgctttatagatgctgaatagatctctttgtttgttttaactgcaatgaaaatcagggaaaatataaaccatctacaagcaaaataagacaatatctcagctataatctgtaatgtagaggagaaacaaattttacctttttttatttttgtagagatagcagctatactacgtagcccaggctggtctcaaacacctggcctcaagcagtcctctcaccttggcctcctaaagtgctgagattacaggtgtgagccactgtgcccaaccaagaaacaaattttaaaatagcaaaataatatatatttcaagagataagggctaaaacatgtctacagtggaaaatacaaggaagtagttatttacacccatacacaataactataaatgtaaaagctgcaactgcaacaggtgtgttctcttggttcctgaagcatggtaagggcctattgttggtgacattttccaaaatggtgagcaacaagccacttcttggtaaagctcttattgttttttttttattttatagtccatcagatgggtcttatggctcatgcctataatcccagcacttcgggatgctgaggtgggtggatcacttgaggccagtagttcaagaccagcctgaccaacatggcgaaaccccgtctgtactaaaaatgcaaaaattagccagtcgtcatggcacgcacctgtaatcccagcttctcgggaggctgaggcaggagaattgcttgaacccgggaggtggaggttgcagtaagccaagattgcgccactgcactccaacctgggtgacagacgagaccctgtctcaaaataaataaataaataaacaaagaaactttataatccatgacacgctgaaataaagttctgactatatcaacatataatcttccattgtttttctcatggaagaattcttagaaattttagttgatgttaaaagtgaaagaaaagtagcttgtcgtaagtaaaattgacttagagtctaggcctcagacacagaagaaagtgtctggtaggacattcaaaagtctgatggaatgtgggacaatattttattgtgtgggcttgttgcctggcaggctgtttagcattgcaattacatgctggtgtctccctcttccctctgtgattgtcacaacccaaattcccctgcaggcttctaaaacacactctagaggctggtactgttgagacacactaggctaagatgccttttcactacatattctgtgtgacattggtttgatgagagtagacaacaggatctggaagtgtaaatttgttttttgttaaaaaaaatctttttggagacatagtcttgttctgttgcccaagctggagtgcagtggcaagatcagggctcactgcagccctgacggcctaagctcaggtgattcttctgcctcagcctcccaagtagctgagactactcagctattggtttttgtttgtttgtttgttttttgagacggagtcacgctctgccacccaggctggagtacagtggtgtgatctcggctcactgcaacatttgcctcctgggttcaagtgattcccctgcctcagcctcctaagtagctgggactacaggcgtgcaccaccacacctaatcaatttttgtatttttagtagagactgggtttcaccatgttggccaggctggtctcaaactcctgacctcaagtgatccgcctgccttggccttccaaagtgctgggattacaggtctgagccactgtgcccggccctcagctattgttttattatttatgtatttatttatttatttttggcagagatgggggaggtctcactgtgttgcccaggcgagtcttgaactcctggcctcaagcgagcctcctgcctcttcgaaagtgctgggattacaggcatgagccacagcgcccagctgaaggtctaaatttagagtgaagagtttgagaagacaaaaagtaacaaaggtgtgatggagtagacagatttatgatttcctgaactcaaaaataaagggaagggtctaagaaggggcaaataggagggggagaaaagtagttgactcccaaaccaaactgaagcccttccttgctgagcttagaggtaaaagaaaatgaaagcaagttgagatcctaagaaaacaagagattaaagttaaataaataaagaggaactcagaagtctgagcaatagtcagaaaaaaataggtgagagtactgtattacagacagatactttatatgaattctttatttgggtgagtctgagattaaatctgtggctttgcaagaaagaagttgatttcagaagagaaaaattggcagtgtaggaatatctaaaaggcaagggagaaatgctgattgcgaagaggagtttattcagaaagaacagtaatattatgatactcattattagaaataatgtgcccctatattaattactatgttgggtacttttttttatttttttatttttttgagacagtctcgctctgtcgctaatgctggagtgcagtggcttactcggctcactgcaagctccgcctcccgggttcacaccattctcctgcctcagcctcccgagtagctcggactacaggtgccccccaccaggcccggctaatttttttttggatttttagtaaagacagggtttcactgtgttagccaggatggtctcgatctcctgacctcatgatccgcccgcctcggcctcccaaagtgctgggattacaggcgtgagccaccgtgccctgcctggtattttttttatagttggcattcctggtacatccatcttattagtcgtgcacataattgtcctaaagatcctgcctttgggaagtgaacattctttttcttttttgaaagagtcttgctctgtcgcccagactggagtgcagtggcatgacctcagctcactgtagccaccacctcctgggttcaagtgattctccagcctcagcctcccaagtagctgggactataggtgtgtaccaccatgctggctaatttttgtattttttcagtagagatgggtttcgccatattggccaggctggtctcaaactcttgaccttaggtgatctgcccacctcggcctcccaaagtgctgggattacaggcctgtgccaccacgcccagctatggaaagtcaatgttctataatggggagaagacagaaaataaatatgtaaatatgcgtgtgggtagggcaggaggtgtgataagcatctgggaagtagtcagggagggaatcactagtaagccaagaacagaagggagccaggcttgcaggtatctgggggatgaagattcaggcagaggctaccacgggtgagagaaccctgagatgagagcaatcagatcacatctggcctgtttgaagaacaaggaggtcagagtgacaagagcagaatgagtgagggcgaatgtcctaggaaatgaggtttagggcaacttggccattataggggttggtgttttcggtttctacttttttagagaaggaggcctcgctatgttgcccaggctggtgttgaactcctgggctgaggcgatccttctgccttcatctcccaagtagctggcctcttaagtagctcagattacaggcacgagctataggacttgggtttttgtttttttgtttttgttttgagatggggtctcgctctgtcacacaggctggagtgcagtggcataatcacagctcattgcagcctcgacctcccaggctcaagtgatcctcccacctcagcctccagagtagctgggactataggcgcatccacgacacctggctaatttttttgttttttgtagaaacagggtctcactgtgttgcccaggctggtcttgaacttctggactcaagtgatcctcccacctaagcctcccaaagtgttgggattacaagcataagccacctcaactggccaggacttggcttttaatcctagtgagatgagaagctattgggggttttgggcaaggaagtggcatgagctgacttacatattaaaagaatcattcttgctgctgtgtggtgactagattgggcagaagttaggagacagttgagaggtttttgcaataatccagaaggaaaatgatggtgatttgaactaagatcaaggtggtaaactgggtgtggtggctcatgcctgtaatcccagaactttgggaggctaagccaggtggatcacctgaggccaggagttcgagaccagcctggcaaacatggcgaaaccacgtctctattaaaaatacaaaaattagccgggcgcagtggcacgtgcctgtagtcccagctactcaggaggctgaggcaggagaatcgcttgaacctgagaggcagaggttgcagtgagccgagattgcactactgcactccatcctggacaacagagcaagactccgtctcaaaaataaataaatacattaattaattaaaaaaaaagagagagaggagctcagttttggataaatttgaggtgactgtcagatatccaagtgacaagaaggcaagttggtgttcaagtttcaagttaagaggtgtcatttgggcctaagatttgaatttgggtgaggtgcagtggttcacgcctgtaatcccagctaaggcaggaggatctcttgaggccgggagttcaagaccagcctggacaacatgtcaagaccctgtttctacaaaatatgttaaaaattagctgggtgtggtatgtctgttatcctagctactcaggaggctgaggtgggaggatcctttgagcccaggagtttgaggctgcagtgagctatgatcatgccactgtcccctgtggctaatttttgtattttttctagtagagacggtgtttcaccgtgttgaccaggctggtctcgaactcctgacctcaagtgatctgcctgccttggcctcccaaagtgctgggattacaggtgtgagccaccgcactggccaatttattgctatcttacttatttaaaaaagaaactatacctttggccacagaacctccagttttttttctatgggaagcaatttgtaacacatcattgtcaattcacttttattttatgggcatttactgcaaaaatacaagcaattccacatcaaagacattgtctatatttaacagaggcctgatagatgggtgggtctatacataagaattgccttgggacttcctctgtgtcattaagaaagaatttaacattagcttagtaaccaaacaagatcaaatatacaggtatttaaacacaaacacacacacaaacacttagcctttgttggaattaagcaagtaatatttaataaaacaaaaattaattgtaggctgggcacagtggttcacactatacccagcactttgggaggccaaggtagttggatcgcttgagctcaaaagtttcagaccagcctggataacatggcagaatgccatctctacaaaagaaatacaaaaattgcctggcatggtggcatgtgcctgtagtcccggctacttgggaggctgaggccagaagatcacttgaacctgggaggtggaggttgcagtgagctgatatcatgctgctccacagaagcctgggtgacagagtgagaccctgtctcaaaaaaaaaaaaaagaaaaaaaatgcaagaataacatttgatttttaaaatgttataaaaaagaggccatgttggccgggcaccgtgggtcacgcctgtaatcccagcactctgggaggccgaggcgggtggatcacctgaggtcaggagttcgcgaccagctggccaacacggtgaaaccccgtctctactaaaaatacaaataattagccgggcgtggtggcggatgcctgtaatcccagctacttgggaggctgaggcaggagaatcgcataaacctgggaggcgtaggttgcagtgagctgagatcaagccattgcactctagcctgggtgacagagcaagactccggctcaaaaaaaaaaaaaccaaaaaacaaaaaacaaaaagaggccatgtcaaaagcacataggagccaaccagaaagagctcccaacagccaatgctggaactgtctgagcagcaaaataaataacataatgttgattataacttgaagtatagaataaataagcacaaatccacacagatatatatatatatatatatatatatatatatatttgaataaatatatatagagaagggacaaatcttttttttttttttttgagatggagtcttgttctgtcacccaggctggagtgcagtggcatgatttcggctcactgcaacctccgcctcccagattcaagcaattctcctgcctcagcctcccaagtagctgggactacaggcgcgagccaccacgcctagctactttttgtatttttagtagagacggggtttcaccatattggcgagggtggtctcgaacttctgatctcaagtgattcgcccacttcggcctcccaaagtgttgggattacaggcgtgagccaccatgcccggccttcattttttaatcgtcagaaattcctgttagtacacttttctttcagaggctgtttacagaggtgggtcaagaccttattagttttttcacacagacatggaggattaaagagatcatcagaatgcctcgaagagaataggttgacagtcttcttagattatcttggtgtgccataccccctcctgcgttttgagaacccctgctttcagagactgtcacttatctgagaacagatgctgtcacagacatgcacagcctcatattcttttcctctttgtcttatcattcctctctggtaactttactgttttgttcctctttttgccttttgtgtcccacccccatttaaaaaaatgtgatgatcagccacggcagattgtacattgttaatggaacatcatgactgtccataatgatgatagcaatagcttcaaggctcttcgtaagtagatattgcgacttcattggttgagaagaaacaaagatacaattcttgccagacacttgctgaggacaggacttaaaaccacagtgcttggccagtagatggcgcgccccgccctcagtgtgcatgacttatgaatgaatatgccctccctatgccctgcaccagcccctcccgcctctgctagcccctccagctcactgctatcagaaccactgtctgaagcgcagattgccaaggcctggctttaaaatggtgtcatggggattgaattggggagagggattctctgtgaaggcaacgggttgaacagcagaagggttgagctagaaaggtggccggggaggaggggcttttgcagccaactgactcgtctcatttggctggagttgggctgggaagggtaatggactaatgtgggaaaggtagatccagagccttgaacctcctaccaaagcattttgacttgctcagtaggccatagagaagccctaaaaggtttttatatatttttaaattttagagacagggtttcagcatgtttcccaggctggtcttgaactcctgggctcatgcgatcggcccacctcccctcccaaagtgctgggattacaggggtgagccaccgagcccagccaggaatcactaaaaggtttgaaggtggcaggatgagagctgtacttgcacaagattaatatgaccaggtttgcggatgcaatgaatgaaaagaaaatgagaatccaatggagaagtcaccttacaacaggaggggtgggctgggcgcggtggctcacacctgtaatcccagcactttgggaggccgaggccatcacctgagctcaggagtttgagaccagcctgaccaacatggtgaaactccatctctactaaaaatacaaaattagccaggcgtggtggccggtgcctgtaatcccagctactccagaggctgaggcagaagacttgcttgaacccgggaggtggaggttgcagtgagccgagatcatgccattgcactccagcctgggcaacaagagcgaaactccatcacaaaccaataacagcaacaagacggatgatggaggaagcatatatgtgacaatttacagttcgggaaattcagagaagtagctcctcaacagtgtcacccgtcagtagaatacttccttccagaatcagtgtcaggaaatgtccaggaagccaggaactgagcctacacatcccgatgtcccaagtgcatgcgcatgtgtggctagccaatcccttgccttcctgcctctgggaagattattaggtcttccatttgttttcaagtaagaagcaaaaaaaaaaaaaaaaaaaggaaaaacagcttgagtttctttccatatcacagccttccaatgtgttattattcaacactgcagtgtcagatttagattttccacctcgaggaatttggtttagctttaattagttgctgtgaatatttctgagccaactctggaaagcatttatctggaaaatagtttccactaaaatataagctggatatagggtatcattttcctaggagggtttgtatcagttaacagttataaattctctccagccctctggatgacttttgccacaagcccatcatcgtcatattggttaattacttattaattaaacacaattcaaaatactgtattgaggcatctgcatcgccatctaagctctagcttcaggacttcagagcgtgaagatttttcggagaaaagataacgcttacaggttattctcatacaggcaactgatgcatttttcatccggcaacttttcataaaaacaagctgaaaaataccagacaaatgaaaaacagacttcagcagttccatgctgcttcctgagtaactgaagaatgtgcttcttgtggttaaaatgagagatctgtttaatatggatcaaatagcaacactccaggcattttcattgacatttcactgtgactttttgaacttaggagtgcggatacgaaaacctactctttctttctgctgcgcggagcctgcacaatctgcagaaagattgcagagccgggccaggcgaggtaacaggctacgtggggttcatgttctctctggttgttccctccccgtttgtacttcatttccattcacacggctgcacttcccagttttccaggatctctcctctgaaaccaggcaagggtttgttcccaaatcccacccattgcctctccagccccagacttgcttactggaccacacataggtggtgggcattggtgacttgtccctagggtcaggggaccagaaacttcccagaggggctggatggagcacggcagcactcagggcacaatggagagcggattcaaagggcaaaggagccgaggaaagcccctctgcccgagcctccccagcgccggccgggctccgctccggagcagccccgccgtctggcagagacatgctgttttgtttaaatcctccacattctttgccatttccccattggccggatggggctaccctccccgccgcggccgctgctgatgtcagcctcgctcgcgctcgctcctcccgcacccacctcccggccccaggcacactgcatcggcgcggacgctccggccccggcgaggtggctgcaaactcgcgggcacgcacggcgcccggggagccgagggactcgggggaggggacgcgcgcggaaggcgccagcttcctcccgcccgcccctggcagccgcgagccgaggttggaggcgcccggggccccagccgggcagagccgagcggcggcggcggcggcggcttcccttttctccccgagccgagccccggagcggcgcggggaccggccctaaaaagagcaggaaatcttgtttaccgcccgcggagagaagccgatcgagcctttgtctggaaagtcagcatctccggctccggctgcaatgtgttcctggtgacattagcatcgggcagacccgccggaggaggggggtcgccaggttcccgtctgctttcggaggcggatcgagcgggtgacttttgtgcattcgttttaatttttggaaatctctcttttttcctccctcgctcgctgccgggcatgtcctgatctggcggccgctcctaccaccctgggcagccgagcagagtcgtccccagcgggtctccctccctgcctccctgactttgcaacaccgcgttccgggaggaccggcctcggcgagggaggaggcgggggagctgcgaacacccagacccaaaccctgacatgctctggggcggagaggaggaagccaggagctgagcgcgccgcgggggctgcttcgccctccggctccgagcgccgggctccgggcgccctgccctgcgcctgggcagcagccttgctggtcttgggggcgccccccgcttcccgccccgggggtccgcggccggcaggaccatgctgctgaaagagtaccggatctgcatgccgctcaccgtagacgaggtaagcgccgcgcccggcccggcctcgcccgctccgggacccccgccgctaccgccgcctcctggccggcgagccccgggcgagcggcaggaaacccaggtggacgttaccccgcaaacccgaagcctggaggagaggagggaggggatttgcggcttccacttgtcaccccagcgggggagggcggcgctgggtggggcggcggactccgggtgggcttttcgggggcgcccagaatccagactgttggggatcactatgagccaaagggagtgggtgcgccccctccctccaaataagaaaatgaataaaccaaacccaagagcccccggcgcgcgctgtagctggggtttggggggcatcccgtcctggccgtgggcccagcctcccctccccgccctctgcggtcaggtaggggtgcgaggaggagccctgcgccctcgggatctgcacgccccgagccccgcgggaggaacctctgagcccttaggggaggtccctgcggggcccgacttctcgccgtcgccgcgggcttgggcgcagctcccggcacgtccgcccttcgaggctcgggacccggctgtgtcctttcgcaaaccgcctggctcggaaactttctgcgtctcttgtttcttccgccgcggggagcggcgcgcgagccgggagcggcgggggctgcgacgcggccacaggagggcgctccagcacgtggtgccggggccgcggctgccggctgggggcgccgggcgcggggcgggggctcgtcctccaagcgcggctctgctgtccttctcccgatcctgcgaagccgcgagctccagtattcaggaagtggtgactcagataggattattccggccccggcttccctttcttccccttcttcctccccacctttgtggtgattccacgactgctgagcgtctctgtccagggacagcgagggagcccaaagccaagcaaggcaacgtgaaactcactagtgtggtttggtgtggcaacacacatgaaatcagccacccagaccgtctttatatttaaatctggtgcctcgaaactatcagatatgtttttgagccactacttggtgagaggggcgatgtgctttgggagagaaaaagatgcataactgagaacatggctgagctcacaggggctgtccgtatttgccatctggaccaagggttaaggtaagacccaagtacaatccaagacaagatcaaagtagctgcaagtttacaaaacgcatcacggggacacaggctgccaaggagggagagatcagcttccaccagaatgaacaaccgagttttggagttcgttggcatttgaggaggtagcatttaagcagggtctggaagggtggatgccaggtgggtagacagagattcgagttgcatatgaccttgtaagtggagaagcaggacatagctttgtggagaaagagaagggcaaatgaatgggactggttaataggagtctttccagaaaaggtggagattgtcccaccttgtgggcagttgagctagagtaattcagctgggaggcatggatccctctactccatatcctaatgaccttgttttttgatatgagtttggattctaggagcaatgttgggactgcatgaaatacacagaaaattgcaggtgataatcaagaaaagaaccagttctagaatcttctctactaactacaaaatctctttatcctagttggttcccttttcaggctttctgaaacactcaggcagatgcttttcccacttttgtttttgtaccgaaatacccacaggtataccgtggggtaattacatttgaatgatataggtggaggcccttccttccttccttccttttttttgtcttttcttttcttttttttttttttgagatggagccttgttatgttgcccagggtggggcgcaatggcgagatctcggctcactgcaacctccgccacctggattcaagcaattctcctgcctcagcctcctgagtagctgagattacaggtgcctgccaccacgtctggctaatttttgtatttttagtagagacggggtttcaccatgttggccaggctggtcttgaatgcctgacctcaggcaatccgcctgcctcagcctcccaaagtgctgggattacaggcatgagccactgcgcccagccagcccttcctttcttaattggccaacaaaatcagactcatcagactccacctgtaatataattataaattctttaatgtataattcattttggccaaagtatgattcagtttctgtaaggttcatattctgaagtcattttcggctttgtcagagaagcaggagggcaatttagattaatagatgtttccaattagtaggattcagattagctaaatctgatgatggatgaagaaatgaggcctagtttgccagatgttaaacccctagagtcagaactgatagtaaattccacagtctccaccatccccttttccactgaccctttttccacattgaaaatgaggaagcaacttgagtttctttaaataagatgtttaggtaaactttggaagcctaactttttttttttctttttgagacacggtctcgctctgtcatccaggctggagtgcagtggcgtgatcctagttcactgcagcctccatctcctgggctcaagtgatcctcccatctcagcctcctgagtagctgggacaataggtgtgtgctgccaacccggctaatttttttactttttgtagagacagggactcgctgtgttgcccaggctggtcttgaactcctgagcttgagtgatcctcctgcctcagccttttaaagtgctgggattgccgggtgcggtggctcacgcctgtaatcccagcacttggggaggctgaggtgggcagatcacgaggtcaggagatcgagaccatcctggctaacacagtgaaaccccgtctctactaaaaatacaaaaaaattaagcaggcctggtggcgggcgcctgtagtcctagctacttgggacgctgaggcagtagaatggcgtgaacctgggaggcggagcttgcagtgagctgagatcacgccactgcactccagcctgggcgacagaacaagactccactcaaaaaaaaaaaaaaaaaaaagggctgggattacaggcatgagccactgcgcccggcctgggagcctaacttttgcttccactcttggttggctctgggcctgattcaacctacatggaacttctggaacttgtttctctctcttttttttttttttttgagacggaatctccctctgtctcccaggctggagcgcagtggtgcaatctcagctcactgcaaggtccacctcccgggttcacgcgagtctcctgcctcagcctcccgagtagctgggactacaggcgccagccaccgcaccctgctaattttttgtatttttagtagagacggggtttcaccgtgttagccaggatggtctcaatctcctgacctcgcgatccgcccgccttggcctcccaaaggcgtgagccaccgcgcccggcctacttgtttctctttaatcaccagagttcattggtagcagtgtccatacttttgaaaatgaagcaaatgctcatgctttgaagaatcagtgagagaacccacactttgcctgcttcttgtgcctggccttatcccttctccctcatttaacactctggtggtggcgggcggtggagcattagtggcactggtgtgttattatctatattttgcagatgaatacattgagattcagaagggttaggtaatgtgctccaggccacacaactagttaatagccaagccagaaggagagcatggtgaaacccattatttgtttttccttactctgctttttgcctgtcactagtgtttaatccagcaaaaggaaaaacatttcttgaaaacagataaagtcagcactatcaagtaaatgaaaaatcagaggccttttgacttgctatagacggtactggcctctactatttctctagctttattttaacacataaaatgttctctagttccaggaaaaaagaacagctctgggcgatcaagaaaataaagctgaactactgtctagattagagtgttggtggggttttttggtgtgtgtgtgtgtgtgtgtgtgtgtgtgtgttttagacattaatttcagagtaaagaattaataaaagtaacattccatagattaattttaattaaaacatttcattggaatagtccctcgtttgtgttaaatgtggtggtctctgaactcaatataagcctgttggaaaggtatgaacaggaaaagttcctgagagctgagagttgctatagagagaaagttgtcattatcttcatttgaaacatttggtagacgtagatgtagattctagagtttttgtttgtttgtttctttttctgagccacactctctcgctctgtcgcccaggctggagtgcagtgggatgatttcggctcactgcgacctccaccgcccggtttcaagcaagtctcctgcctcagcctcccgagtagctgggattacaggcgcccaccatcacgccaggctaattttttgtatttttagtagagaaggggtttcaccatgttggtcaggcttgtctcgaactcctgacctcaggcgatccgcccactttgggctcccaaagtgctgggattacaggcatgagccactgcccccggatgattctagagttttagacttagaaggcgtattggagatgatttataattgagccatttatttatttatttatttgtttgtttatttttgagatggagtcttgctctttcacccaggctggagtgcagtggcgcaatcttggctcactgaaacctctgcctcccgagttcaagagattctcctgcctcagcctccagaatagctgggatttacaggcttgtaccaccccagccagctaatttttgtgtttttagtagagatggggtttcaccatgttggtcaggctggtctcgaactcctgagagttcatgcccggtgagccatttcattttataatgaagtctagacctgtagtaggtgcagttaagttgtctacctcattgacaaactctaggctagaaccaggtctgatttaaggctcaaggctgttctactatatggaattctccctcctctgagattccttggtggaagaaaatattctcctgaggacccatgtgtaaagcaggtacactggctctactctctagttgaaggtggctggggactccaaccttgtgtctgcttagcgggacacatagggtagccccattggaacctattggaagggtggcccacctcctcccgcagccactcggtcccagtgagcgacctgctcaccaaggaggctccttggagcacagtctgaagatcaccctgcacctgccaccctcgccacagaggtacttgttagtaaaatgagcgtctctcaagagacgctaagcacatcctaatattatctaaggcaggaatccttttgttttcattgctttctttactgtttaaccgttctggccaggcgcggtggctcatgcctgtaatcccagcactttgggaggctgaggcgggtggatcacctgaggtcgggagtttgagaccagcctgactaacatgagaaaccccgtctctactaaaaatacaaaattagccaggcgtggtggcgcatgcctgtaatcccaggtacttgggagggtgaggcaggagaattacttgaaccagggaggtggaggttgtggtgagctgagatcgcaccatcgcactccagcctgggcaacaagagcaaaactctgtctcaaaaaaacaaaaacaaacgaacaaacaaaccaaaaaccagttcttgtttaacagttcctgttctgactgcattcacataaatgtgtatacttttagggattgatttgtggtctctagggatatggtgcacaatgcagaaaaatagaaacactcccctcccctccgagaaaagagaaggaaaggaaagaaaagaaaaacaactttttcatacagaatattattttcttttttgccctggcagggagccagtgcacttcatccaggcacccccagggtccccagagagttttcttgcgcacatttctgagaacggatttgggatcagggtggtgctgcctctggaatgacatgaatggaaatgccaaaatgcccaacagtgttccttgttctctttttttttttttttgagacggagtctcgctctttcgcccaggccagagtgcagtggcgcgatctcggctcactgcaagctccgcctcccgggttcacgccattctcctgcctcagcttcccgagtatctgggattacaggcgcccgccactgcgcccagctgattttttgtatttttagtagagacggggtttcacccttttaaccaggatggtctcgatctcctgacctcgtgatctgcccgcctcggcctcccaaagtgctgggattacaggcatgagccactgcgccgggccttgttctcagttttaaaccattttcctgaaatgcatctgcaaacatatcaaggcagaaattattgaaaggaagagattttaagtttgctgctggcgtcaatacctctgaatataaaggataaagactccttggattaatctcacagactttccccaaggtttcttgtaaatgtaatttggaaaatgttttccttgtctggtataaaaattttattctgaataagataattctataaaaagttttctcaagaacgagcacaattttgagaggttgttttattttattttaaattttctgttgagaagggaccaaggtcagggtcatgcgtgtgatttctgtgtgatccaggtggtttccttggtggcttgttctgggaggtgaagccagttggacttcttggtccggtggggacttggagaacttttctgtcttacaagaggattgtaaaatgcaccaatcagcgctctgtagctagctagagatttctaaaatacgctaatcagcacgctgcaaaaacgcaccaatcaggtctctgtggctagctagcggtttctaaaatgcgctaatcagcactctgcaaaaacgcaccaatcagctctctgtggctagctagaggtttgtaaaatggaccaatcagtgctcagtaaaatgcaccaatcagtgctctgtaaaatggagcaatcagcactctgtaaaatggaccaatcagcaggacatgggcggggacaaataagggaataatggctgaccacccctcccccctcccctccccccaggcaccttccaggctgtggaagctttgctcttttgctgttcactcttttgctgttcacactaaatcttcctgctgtccgctctttggtccgcaccacctttaagagctgtaacactcaccgtgaaggtccgcggcttcattcttgaagtgagcgagaccaagaacccaccggaaggaaccatctccggacacagttccacagccaggggacagtggaggtttggctagctgtctggcaaagctccggttttttttttgtcataacgggcacagggaaaggagggcgggtaaatagatttgtgcaaacctttcaacactaatggaacagacaaggagcagatgctgtcctcctggctggtcagtgaaattgactctgtccatgaaggaagctgcattttcccagtgacttgggtggaagtacctggcgcaggagatagatacagggatcagggaagcaaactgttgttaacaaaaccctggttaaaagtaggtagtaattaacttttgctttttcttattgtgatatggaggaagttcctaaggctcttgaaagtcaatttagaaaccttgtgtctgattgcgtgagtgtgactgatactccaaagcaaagcgagtaatattcatttcagtaaggctgtcgtttcaggcgaatggagaatattatttattgtaggcattaaaagaaattaatatactttatttattttgagacggagttttgctcttgtcgcccaggctggagtgcagtggcgctatcgcggctcactgcaacctccgcctcccaggtttcaaggggttctcctgcctcagcctcccgactagctgggattacaggcgcctgccagcatgtccagctaatttttgtatttttagtagagtcggggtttcaccatgttgtccaggctggtctcgaactcctgacctcaggtgatccacccgcctcggcctctcagagtgctgggattacaggtgtgagccactgcgccccgcctaaactaaattaatatagtttaaacattcaacctctttaagagcttcccctctcctagggatgtgtaggtatgagatggggagtggggaatcacaacgttttgggtttttaaaaatgtgaaagtgtatgcacaaaggcagtaaatgtgtttttcagaagcagtaattactggaaaagtacatctaggttcattgctttagcggcctgagtgagatcgcagcaccctggctggcttgtgtgggctttggcctgttttctgttgcctggaggtctgtagtgttaggcaagtctgaaaactaggtaacacttttgccctgtatcagagaaacagactgagttctagaaatcagctaacttgtactgagaaggttttatgtatctttaacaaattcagcccaccgggagaggaaaaggagaatttcagactagaaatcaggaattttgtatattcccaagtgaagatttttcttgtaggttacaaggaggatgaggcgcaaatatattacaaatattaaaacggacaaaccaatcgtatctggaaaatgtagagttgtctggaaaaataatcttggaaactttactttttgtactatgcaacctctaatttacaaataacatccaaatcattcaaacgaacagcgtcgcagggctgcacaccgccagggggcgccatttacatgggacccagtgggagtagagcagtgtgatggcctgcaactgaccaacctgccttttactgccctttcatgctcccagcccctgctgctctcctgggttagaaattgaaagtttataccaaactcatgggtttacaagtggaaacatcacacccttagcatcgtctttcctgaacactccatctacaatagctttttcctcatctaaatctctggccaggcacagcggctcacgcctgtaatcccagcactttggggtgccgaggcagacgggtcacttgaggtcgggagtttaagatcagcctggccaacgtgatgaaaccccatctctactaaaaacacaaaaattagctgggcatggtggtgggcgcctgtaatcccagctactcgggaggccaacgcaggagaattgcttgaacccgggaggtggaagttgcagtgagctgagatcgaggctgcactccagcctggctgacagagcgaaactctgtctcaaaataaaatataaaataaaataatcttttccttaatattctcgctatttatatcctctattatctgcctctccacgcctgtttattccttcagagcatttatcgcaatttgtacttattttgtttaattgtttgttgtctatcgccatcattatcttttcaacatgtaatccacatgagaaaatactgatacaatcttttcacttatttttttcacactaagtctttgaaatcaggtgtgtattttccgtggacacgcatctcagtttcactggccgctctgcagtgctcaaggaccatgtgtggcttgtggctgccatactggacagtgcaggtctggtgcttaaacttagggtccacacatagtaaatacttgctgaatgaatggataggaagaagctgaggaaaacaggaactttttaaggaaccctgatcctctatgtcctcctgtaaaaggtttaaaattttttcacttgtatactgcctgaaattttaccaattagagattcttttgtatttaatacatcctcattaaaaaatttcttagtgatacccctgagaagtttgaaatcagtcacatatatttaggagttattgccgtcagactgctttcctcccaattcccggaggagtatgtatattagttttcgtttctttttttcgtgtttttttttttttttttcccttggagtcttgctcttgttgcccaggctggagtgcagttctttcagctcactgcaacctctgcctcctggtttcaagtgattctcctgcctcagcctcccgagtagctgggattacaggtgcccaccaccacgcccggctaatttttgtatttttagtagagacgaggtttctccatgttggccaggctggccttgaactcctgacctagtgatccacctgtcttggcctctcaaagtgttgggattacaggcatgagccactgcacccggcctcttttgttttttactctgagacatagtcttgctctgtcacccaggctggagtgcagtgtgcatgatctcgactcactgcaacctccacctctcgggttcaagcaatcctcccgcctcagctttcttagtagctgagactacagactagcaccaccacacctggctggtcttgtatttttagtagagacagggtttcaccatgtaggccaggctggtctcgaactcctgacctccggtgatccacccgcctcggcctcccaaagtgagccaccgcgcctggcagtatattagttttctattgctgtgttacaaatgatcacaaactcagtggcttacaataacacccatttattagcacacaaattctgtgggtcagaagtctaggtgcagcatggctggattctctgctcagggtctcataaagctgacatcaaggcgtcagtcaggctgcctttctttctggagcttggagttgtcttcagggttcacatggttgttggcagaatgcagttccttactgcatccatcagttagaggctcgatcccagaggccacctgccgtgtcctgccatgtggccctctccacaacatggcagtttgctcttgcaaggctagcaggagcttctactgcaacttcagatctctccgacttgctgtctctgacttcttgattcttttccaaaagggctcaccaatcagtgggaatcttgggggccattctgcctctcctagggagattagctgaattagagaagtagttatttcttgaatctggaaaacagggctatggaagttccaggctggcatcatgaaaacatccattcacagatactttattgaactcctgctctgtgccgggtgctaggcctgcagcggctgacagggcaggtagatccctgccctcctgaagctcctaggccagaggacactggagaggttttattgccatttaaaaatagatgatggccatagttgcacaagtctgtaagtgtattaagaaccattgaattggtatgtaaagtacatctcagtaaagctgttttttgttttgttgttgttgttgttgttgttgtttttgagatggagtctcactctgttgcccaggctagagtgctatggcgcaatctcggctcactgcaccctccgcttcctgggttcaagcaattctcctgcctcagtctcccgagtagctgggactacaggcacgtgccaccacgcccggctaattgtttgtatttttagtagagacggggtttcactgtggtagccaggatggtctcgaactcctgacctcgtgatccacccacctcggcctcccaaagtgctgggattgcagacgcgagccaccgtgcccggccaaagctgtttttttagaaatagaagtgcttacagatttgtttgagcagaatagatacccatgttcagagagagagagagagccattgagaggcagagagtgccgaatgtgaattctgtgtaaattgaaaagttacggtccccgtccataaggagatggctctggttgtcttgaatttagacagctttccagaggaggaggttctctcctgcagcagtgtgggaaaaaaatctaccagatttggaccagaatgactgcaatttaggtcagaacatgatacttagagggaaaaaagtaatcatggcttgaatagctgccctaaggccagctacagggctgcaggggtctgtggaacctttcttgtcagaactcaggatccttaggagtccccacaagggcatggaggctgtggccatcatgagtggaagaaccagcttccaaaggaacctaggattgttctggccctggctccaggtgcatatctctgctttccgtgagcattgaatgggaaatcacgtgttagcagaataaatcccagaatacacattcaggaggagatggttccacatggcacgtaagtcctttgccttattgatgtttgtctggcagatgtccttaagccttcccatcaagggctttattctaagggtggctaactggctatttaaacctcatctcaatagtgtctgtctaggatggcaaaatcacaccaggttctgctgggcaaatctcccaggtggcgtattgctagaggagagcgccactgcagaggacacactgtcttggccactggctttgcaaaccatagtggaggagggagtctggggtcaccaaccacttcctggctgactgcctgagccacattatacaagactgtttgttgacttagtaatactgaagccagagctcaccaagattctgacatcaagcatgaaagtgactaattctttcatttcccagcactttgacaaaggggactctcttaaaactcctcatcggacgttagtggaagtcgactcatgtatctaaacatgtagccagcgtaagttcttggtcagattgatctaatgacttttttagcgtgtgtgtgtgtgtgtgtgtgtgtgtttaatctttttaagtttgggtgaagtttgaccttctagaattcctgtttattcctgagcaaagaaaaaaaaatcaaccctttttaattcctttagcatcatatctgaccatctttagggtgttatttctttcctagactgaatcactcagagaaataagattggccaacaaatgtaatttgatgataccctataatagtgttttttaagtacctaatctaagccgctaatctccaaagactgttcccccgccccatgtcatcttacacacacacacaggcacaaaaacacacacattctgttctgattatatttgctgtattaaggccaaatccaggtgtttctgagcactagtttgtgtgtttttatgttgaaaataactagtttatgtatttatttatttatttatttttgagatggagtctcacattgtcatccaggctggagtgcagtggtgtgatcttggctcactgcaacctccgcctcctgggttcaagtgattctcctgcctcagcatcccaagtagctgggattgcaggtacccaccgccacgcccggctaatttttatatttttagtagagatggggtttcaccaggttggccaggctggtctcgaactcctgacctcaggtgatctgctcacctcggcctctcaaagtgttgggattacaggagtgagccaccgcaccgggccaaaaaatccaatttcttagagattaaataacccttcaggattatcaaaggaaataattagggaaaggtagatgttctgtcccagtaagagaagaaagtggtccagaaattttatctcccatcaaatgatccattttacttaagtattaaaccaagtgacattcttcagtttaactctgataaatgaatcatattcctcttcgaaaataacttttgtatttcgtgctctaaaaagagaaccacccctacactcttggaaattattccttttaatggcagtaaaaacctttggctttcataggcatcatcagcagagatgttagttcatgagcacctgtgagtttctcaaaattagtatctgaaaatgatgggaacacacaagcgataccatcatgtctttggcacatttagttgaaaacttaaaattcttccggtggaggtaagcaaattggaaggtattaaaaatgatcagagtgtactattcagagttatagatttacccttccatccaagatggctgcgccttggaaacccccagctcacttttactagcagtgcctccagatccagtttctaaatcacacagggagattaacattattcttttatagtcacactgcatgtggactaaaataattttttttaaagagaccggggtctcgccatgttgcccaggctggtctcaaactcccgagctcaagtgatctaccagccttggcctcccaaagtgctgggattataggtgtgagccgctgcgcttggctaaaataaatattttaaaatttaacacgattattattttgaaattggaactctaaaagacttttcaaaattcaaaatgatcaggaatgttaaaaacaatgaaaaaaagcacccctaaacctgccctagattccccaggggagagtcaaagatgttttgctttgtatcagcactattgaaataaacatattgtcacctaaaaggaactatttgaagaggactgcacttcactggatgtgtatatcctggtgagttttttattaatgtttattgttttttaaaaaatgtgttaaaatggctgggtgcagtggcttacacctgtaatcctagcacttcgggaggccaaggcaggcggattacttgaggtcaggagttggaaaccatggtcaggagttggccaacatggtgaaaccccatctctactaaaaatacagaaaagttagccgggcatggtggtgcacgcctgtgaccccagctactcaggaggctgaggcaggagaatcgcttgaacctgggaggcagaggttgtggtgagtcaagatcgcaccactgcactccagcctgggctacagagcaagactccacctcaaaaaaaaaaaaaaagcagaaaaatgtgttaaaaatatacacataacatttgccatcttaaaacttttcgagtgtacagtttcagtagaattgggtacacttacattgttgtccagccatcaccaccgcccatcttcagaacagttttcatcttgcagaattgaaactctgtatccatttaaccctaaatccctatttctccctaccccaaagcccctggcaaccaccatcctactttctgtctctgtgaatttgactactctaggtatctgatcaggtttttttttttaattggttattacttatcattaaactcattcatcgtttcttgaaataaacccaataaactttaatggaagctcataagaatttttttctgaattctgccctctgtcaaaggaagaaaatgacaacatggacgcatatctgtatttgggtggcattaatgactcagtgaccttcacttttgcagccagcgaaatacttggcaattttaatttagaaatattactgtatcatcatttaacagaaatacttactaaagcagaaatatactgactttagaagcatttcaaagaagcagggttggcactgaccagtgttctcttaaggtagaagacagaatatttgactaaagacagtgctgtagcaggtagaaatagacattatttagaccccttttctgagtaaggaagaccagttaaaatgttagcttattttttgggattttagaaatgtttaactcaagagaaaaatataacttaagtcagtgtaatggcgtatgaataagttaaccgtgtaacattttcttttttcttctgcctcagcctcgcgagtagctgaaactgaacaggcacccgccaccacacccgcctaatttttgtatttttcacagagatggggcctcaccacattgaccaggctgttctcaaactcctgacctcatgatccacccatctcagcttcccaaagtgctgagattacaagcgtgagccaccatgcccgacccatcttattttttaaagagggagtttagtactgattcttagatcaaaagcagccaaatccccagtatcacagaagagatgagggtctggttatgtggcccaggctggtctcaaactcctaggctcaagtgatcctcccgccttaacctcctaaagtgctgggattacaggcatgagccaccaagcctggccttctttaacctttgtgttgtaaatgtgtaatgttttggtaacagtaagggttaaataaacaccttttctccctagtaggaaaatgcttctcagattggattgaaactctgaagaccaacatttttctagatactttcttggatagtgttcatgacaaactgctacttgaaagtggcaggaccattgtactataaaatctagtaaagcccaggtcattggctatagggagttgaaagctctatttgtagacatcactaggagaactgacaagaatgaaaatgttacacagttaaggccgggcacggtggctcacgcctgtaatcccagcactttgggaggccgaggcgggtggatcatgaggtcaggagatcgagaccatcctggctaaaccccgtctcgactaaaaatacaaaatattagccaggcgtggtggcgggcgcctgtagtcccagctacttggggaggctgagatagaagaatggtgtgaacccgggaggcggagcttgcagtgagccgagattgtgccactgcactctagcctgggcaacagagtgagaccccgtctcgaggaaaaaaaaaaaaggttgccaggagcagtggctcatacctataatctcaacactttgggaggatgaggtaggaggatcactgagcctagaagttcaagaacagcctggccaacatagtgagaccccatatctatttatgtatatattttaaaagttatagaaaacaacgctcttattaaactggtaattagcaactaaagtagaaaaacatcactggatagatggctgagaaaagggatctgtaatcacctgcttatctggacaggttttttcttttttttttttttagagatagggtcccactctgttgcccaggcaccatcatgactcattgtagcctcacacttctgggctcatgctatcctcctgagtagctaggacaacgggtctgcaccaccatgtctggctaatttttttctttttgtagagatgggcggggaggtgtcttgttacattgcccaggctggtctcgaactcttagcctcaagcaatcctcctgtcttggcctcccaaaatgctgggattacaggtgagagccaccacacctggcctggacaggtagttttgaaaacaggggttatcactagagaagtctgtgcttgagctgaggagcatgtcttctgaaatgtgtaaatttcctatagttagttccctggtggcgtggccctccatcaagaacattttgctgagttttccctgacttaaaataataacagtgatgctggtgctgatgaaaagactgatgtggcccttacatcccacatgaatcatcattcgggattattgtagcctccataaaagtgacgcagtggatgaaagtggtttttctcaatacttaaaaacactgtgaaaatgagataggtttaaagatataaatgtgattttttaaatcctgcccccccacccaagtgccaggagtttggtaactagaattgcatttagtcatcggggtacagattgtactgtgcgggctggagactcaaaccctgggctattgaaggccatgacaaatgctcattttttaatattatgtttttgctgctcatgaagaagcatcatgttcaaaatgaaaaatctttagattcaggacttaatagttcacctcttttggattgcgtttgacggaaacttggacacagctgagtgtaattatgcttttcagcagcatgacttatagtactgcagatatgggcatactttgagatttttctttttgccaaaatttgtctgaaaaggagcttggtggtggttgtgtgtgcttgtgtgtttttaaggtaattaggctattagaggtccaaatggaataatccccttaagccttttcaggaaaaacactttggaaaggttaagtaaatttaaaattagccattatttacgtaggtgctcagccttttgaccatgttctctaggagttgtttcttttacatttaggttatgtttgtcagaaaccatcttattttttatttttatttttctttctttctttatttttgagatggagtctcattctgttgcccaggctggagtgcagtggcgtgatctcagctcactgcaacctctgccctcaggttcaagcaattctcctgccttagcctcccaagtagctgggattacaggcaccggccaccacacctggctaatttttgtattttagtagggacggggtttcatcatgttggccaggctggtcttgaactcctgacctcaggtgatccaccagcctcggcctcccaaagtgctgtgattacaggcgtgagccaccacacctggccttatttttattttttgagatggggtctctctgttgcccagactggagtgcagtggtgcaatcactgctcgctgcagccttcacctccctgagctcaagcctcagcctcctgaatagctgggaccacaggtgtgtgccactacactgggctaattaaaaaaaaaagtttagagacagggtcttgctatgttgcccaggctgtttttcaactcctgggctcaaggaatcctcctgcctcatcctcccaaagtgctgggattacaggtataagccatttcacctggcaaccatcttatttttttaaatttatttttatttatttattttttgagacgaagtctcactcttatcccctaggctggagtgcgatggtgtgatctcagctcactgcaacctctgcctcccaggttcaagcgattctcctgcctcagcctcccaagtagctgggattacaggcgcctgccaccacgcccggctaatttttgtatttttagtatagacggggtttctccatgttggccaggctggtctcgaactcctgacctcaggtaatccacccgcctcggcctctcaaagtgctgagattgcaggcgtcagccaccacgcctggccgtgaccatcttatttttttaaagagagagttcagtactggttctgagatcaaaagcagccagatccctggtatcacagaagcttcatcacggattcatctatttttcatctccagaatggccacctcagtgctgtcctggccaaaaatctgttctctagacctggagaaggaactgccctgagggtcttccacacctctctttttgagaaaagttaagaacaaagtaaaaagatgcagtggagaaatgacgtcgggggttaatggattgggattttagggctggagtccaggcttatgttgctctctgctgagctcaggatctgcactgaacatctctctaaatcatgggctggggtaaaacctgcttacactggctcagaccggaggactttgcagccacctcaagacacacgtttgggtgtgtcccatctccaatcaggatgttcaacttgctttcttggatctttttgaattgcgaatttggccatagctgaccacttgtttttgcatcaatacttcaaagggttcaaggccaggtgcggtggctcacgcctgtaatcccagcactttgggaggccgaggcgggccgatcacgaggtcaggaaatcgagactatcctggctcacatggtgaaaccctgtctcgactaaaaatacaaacaattagccgggcgtggtggcgggcacctgtagtcccaactactcgagaggctggggcaggagaatggtgtgaacccgggaggcggagcttgcagtgagccgagatcgcgccactgcactccagcctgggcgacagagcgagactccgtctccaaaaaaaaaaaaaaaaaagtgttcaaattttaagtcctggtaatttatcccctcccatagcaagtattggcgcaaaagtaattgtggtttcagaccatgaattttaaatcattgtaactaggcccaaatacatctttattaatcaaaataatcaacacatttttgccaatgagaaataagtttgttttttcctttaatgtaaaaatctgtgcttcgggattcagcgaactcttggaaagcatttttttcttcatcctgctggttgtggaagcgtttttctgtataaaaagttgtcgagatgcttgaagaagtggtaatcggttggcaagaggtcaggtgaatatggcggaggaggcaaaactctgtagcccaattggttcaactttctaggcattggttgtgcgacgtgcagttgggtgttgttgtggagaagaattgggcccttcctgttgaccagtgccggctgcaggagttgcagtttttggtgcatctcatcgatttgctgagcatacttctcagctgtaatggtttccccaggattcagaaagccgtaatggatcagaccagcagcagcgaccaccagtgaccgggatctttttttggtgcaagtttggcttttgggaagtgctttggattttcttctcaatccaaccactgagctgatcatcaccagttgtcgtataaaatctatttttcattgcacgtcacaatccgatcgagaaatggttcattgttgtggcatagagtaagggaagacaacacttcaaaacgacaatgtttttgattttcgctcagctcatgaggcatgcacttatgaagctttctcacctttccaatttgcttcaaaggccgagtaaccatagagtggttgacgcagagttcttcggcaacttctcgtgtagttgtaagaggatcagctttttttttttttttttttttttttgagacgcagtcgcgctctgtttcccaggctggagtgcagtggtgcgatctcggctcactgcaacttccgcctcctgggttcaagcgattctcctgcctcagcctcccgagtagctgggattacaggcacatgccaccacgcccggctaatttttgtatttttagtagagacggggtttcactgtgttagccaggctggtctcgaactcctgaccttgtgatctgctcacctcggcctcccaaagtgctgggattacaggcgtgagccactgtgcctgtcagagggtaaactttgatggttgttctcagttggtcgttgtcaactttcaatggctgggcactagcttcatcttcaaggctctcgtctcctttgaaaaacttcttgaaccactactgcactgtgcattctttagccattcctgggggcaaatgcgttgttgatgttgagagttgtctccgctgctttaccacacattttgaactcgaataagaaaatcgcttgaatttgctttttgtctaacatcatttccatagtctaaaataaaataaacagcaagtaataagtcattagcaaaaaaagtgaaagaatgtgcattaaaatgatgtataacataaccacatttatttaagaatgtattccaatatcaaatggcaaattccaacagtgcaaaaacttacccctgaaaacaggcatagtcactttcaaacttgatttttctttcattttactctaccttttcatttgatgaaacacctttgcattttatctccctgagccaaagtacctgtaagttgcccggagttggggttggtgcaatactgtggaagagtgtggacacggaagacctagtcagtccttgctgtgtgatatcaatgatttgattgagaaagactcattttcctgggcctcacctgtcaattttctcaactgtcaaatgccctcttttggcctgtattaggggctgatctcatgcaatacggagcctactctgcaaatacaaggggtcatggtcattgtccatttgtggggagtgtgaaaacacctggtgatcatgatgggctaggtactgtttcacactttaaaatgcctttattttagggggaccctctagtgccataggtattttggagtctctgctttccaaatggcctatgggaaatcctgagatgtccgtgggatctaactttgcccagtgggaatgttgtgtcatagtcataaaggcttaaggattagtttatttccagccctgcaggggctataaattgctactttaaatttcattccagcaccctgatgtttatgttgctatggtggtgtgtctcttgctcgggtgacaagattgccattggaaataggccaaaataacagcctaacaggtggctgtgctttgggaagtcatttgcaaaactattttgcgaagaagtctggtgcaaataagtcacatgactgtgcccttaactgtagtttatagtttagcatttttttaaaacgcattcctccccctttccgttttatatatagacttttttcctctttcaagtagtgccgtgctgatttcctgtagtaacacaaggaaagatttcagctcattttatttagcagtggatgtcctttccttattttttgtaaccagagccctctttctaaaaataacccttcttttcctaatgtgattcttcttatagctgatgtactctatttaaatgaaaggcctctttttaacatgcccattttaatcgatatatatttattacatataactatatataataaaatacatatataaatatataataaaagtagatttccctgtagggtctaatccttcgtgaatgtggtagcagaaattgttcgttacgctttcacctgccaattatgattgttttctttctttctgtttttttttggagatggtgtctcactctgtcatgtcacccaggctggggtgcggtggtgccaactcggctcactgcatcactgcaacctccacctcccgggttcaggcaattctcctgcctcagcctcccgagtagctgggattacaagcatgcgccaccacacccagctaatttttgtatttttagtagagacggggtttcaccatattggccaggctggtctcaaactcctgacctcaagtgatccgcccgccctggtctcccaaaatgctgggattacaggcgtgagccaccgcgcctggccagttttctttcttttgagataaaatcacggaaagaacctgagtattaaaccagttaaacttcctacccacttaagagtcctttctatgataatcttggatggcaatcatcttgcctttgggcttaataccagccatcgcttgggtgtgggctctttttggtaatacaacctctatgattttccactttgatttgttggaagatgctttctcatgtttagttggtatctgactccttagagctttcaggatcgtttctaccactatagtgacaaacacaagccctttccacatgctgactctttaaacatttaaagaaatctataatgttggctgggtgcggtggctcatgcctgtaatcccagcattttgggaggccgaggcaggtggatcatgaggtcaggagttcaagaccagcctggccaagatggtgaaaccccatctccactaaaaatacaaaaattagccgggcctggtggtgggcgcctgtaatcccagatactcaggaggctgaggcagagaattgtttgaacccaggaggcggaggttgcagttagccgggattgcgccactgcactcaagcctagaagacagagtgagactctacctcaaagaaaaaaagaaaagaaaagaaaagaaatctagattgttctcctttgatcttctcttccactggcttgctactctcaattccttcagattgaatttatgaaatgcttttgtctccctcaccattcctgtggttcctctttcttattgccctttagaaaatattgaacgcaatgcgttacagcagaggtcaactaactttttctgcaaaccgccagatagcaatattttagacttgcaagccgtaaggtctctgttgcaactactcaactctgacctcataacatgaaagcaggcatagggcaacatgtaaatgaataggcgtggctgtgttccagtaacattttatttgtggacactgaaatttgaatttcataaaattttcacatgccacgaaatattatgtgccttttgctttttcttttccaaccatttaaaaatgcaaaacccatttgtagttggagaggcgtacaaaaacaggctatgggctgcatttggcccatgggccgttatttactgatcttagatattggaggaccagtgctgaaaccactggaacttcagctttaacactagcactgtcattttcagaagccgcatcaaactgctggctgcttctgacaaggtggtcagttacacttggtcttctccaccccccatcccccgcccctccgccatttcctgacaaagctgtctctctaacctgtgggtatgtgttctgccgaaaacaagcagccataccacagcagccgtaaccataggactttgaaacaaatgcaatgaatggcatccactagtttcaagtttgaccacatgtttttattgtttgtttgtttgttttttgagttggagtctcgctttgtcgcccaggctggagtgcagtggcgcaatcgctgttcactgcaatcttcccctccctggatcaagtgattctcctgcctcagcctcccaagtagctgggattacaggtgcccaccaccatgcccggctaatttttgtgtttttagtagagacagaatttcaccatgttggccagactagtccggaacgcctgacctcaagtgatctgcccaccttggcctcccaaagtgctgggattacaggcgtgagccaccgcgcctagcctgaccacgtttttgattcttgcttctgttatatctgtattaaccgttcttcttagcttcgtggcagatgtgataagcatgcctttgtgtctttctctaagtcactgacttttcagtaacatctaaatcataaaacataggtctggccaggtgaagtgcttgtgcctgtaatcccaaggggccaaggcgggaggattgctttagtccaggagttggagactagcctgggcaacacagtggacctcatctctacaaaaaaaaaaaaaaaaaaaaaaaaaaaaagtcatgactgctttcctttgttgcagaaaccagtaggtatttgggtgtagaaatgaaaccctcaattatattcataaggctaaaaatgaactattccctacttcctcatttgttttgatttttaaaataaggttctcgttagatattttgagaaacagtttaagattataattttgtatgcagaggagaaaatttagaaaatggtgaagccaacttttttagtgtataaacatttaatcataattatatatgtgtccgtgtggacatttatttaccaaggctttgctttaaggggaagggagaacacagagggccaacatttatggaacattctagtgggccaggcccaatgtgttaatcatctcatttcaattttgcagttatcctccaaggtggatcctattatcttcatttaacagacgtggaaattgaggcttagaggatttgacaaaattacccccatcattaatggcagagctgggtgtaaaccctgggcttggactggcgttatgtctcacggctgtaatcctagcattttgggaggctgaggtgggtggatcacctgaggtcaggagtttgagaccaggctggccaacatcctgaaaccctgtctccactaaaaatacgaaaattagccgtgtgtggtggcaggtgcctgtaatcccagctacttgggaggctgaggcaggagaatcccttgaacctgggaggtggaggttgcagtgagccgagattgcgccgctgctctccagcctgggcgactgagccaggctccatctcaaaacaaacaaacaaaatccctgggctttttggctacaaattccattccaacaacacctttgttttgcataaccaaagagaagttgatgttaattcattgtcaagttatttgtaccgatatactaaatatcctaaaatggggatatgttcctcaattatttactggaatggtaacatttctggagcatatatcttcaaaactgtaatgtaaattaagaatatgaacattctcagtggaaaatgactgttcaagttaacattatttgcatttgccattcttttgtaaagccagaaacgtagatacaattttagattaccttcaagctattataaatcttgagggaaaccttgattgttttttagaaaaatatgtctatctagactgtgtcttgcaaacaggcactttaagatgtcattatatgaatattcagaaactcagatgtaatagaacctagatgagaatgtgtgataatctaaagatatcatttaagtcagggctttaaaaatacatgacttcaagtgaaaaactgagccttgtaaagaagttctttacaattcaccaagcatgctctaaacctgcatccatcctgagttctttaaaagcagacttataaaagggagatgaaagatattttcaaaatatatttttgaagcacaaagtaaaacatatttaatattttaattgtttgaaatgagttgcttaaactagtagctgctgctgggaatgacaaaagcttggctaagattattctatggggaagctggtttatggctttctggagctggtggccaggcatggtgtagattatgggttgcttgtaggattatgtttgttattgcctctttttttaactccctataggagcttttatagtgctttgcacatggtggttgcttcgttgaggatgactaccagtttatggtcatttaaattcagatttagggccaggcaccgtcactcacgcctatgatcccagcactttgggaggccgaggcaggcagatcacctgaggtcaggagttcgaggctagcctggccaacatggtgaaaccctgtgtctactaaaaatacaaaaattagccaggcatgatggcgcacacctgtaatcccagctacttgggaggctgaggcatgagaatcacttgaacccaggagttggaggttgtagtgagccaagatcgtgccactgcattccagcctgggcaacagagtaagactccgtttaaaaaaaaaaaaattcagatttagggacaggcgcagtggctcatgactgtaatcccatctactggggaggctgaggtgggaggatcatttgagcctgggagttcagggctgcagtgagctgtgattgtgccactgtactccagtctgggtgatagagcaagaccctgtctcaaaaaaaaaaaatcagatttaattttgtgttgattgtggcttaaaaaacaagaaaaatatattgctgttcaaaaatttttattttttattggatattgcacgggtatgaatcaatttacccataaatctatcgtccgtttaataagtagaatgttacgagtttactcaacattttctttctttctttctttcttttttttttttttgagacagggtctcgctctgtcgcccaggctggagtgtagtgtcgtgatctcagcttactgcaacttctgcctcctgggttcaagcgattctcctgcctcagcctcccgagtagctgggattacaggcatgcaccaccacgctcagctaattttttgtatttttagtagagatggggtttcgccatgttgcccaggctggtcttgaactcctgagctcaggtgatcctcccgccttggcctcccaaagtgctgggattacaagtgtgagccaccatgcctggcccctgttcaacattttctatatgtctcttcctgatcccagaccttctgtacatatgacattatagatgatttagtcttcaataacttgctattttttcctagtaacttttcaaagagatatcattcacatgccacaaaattcattcttttaaacaaatgtacagatccctagtttttagtatattcttaaggttatgcacccatcaccactattcaattctagaatattttcttttccctttttggagaatgggtcttgctatgttgccgggctggagtacagtggcttttcacaggcgcgatcatcacgcactacagccttgaactcctgggctcaaacatttctcctgcctcagcctcctgagtagctggatttcaggtgtgtgtcaccttgcttggccaattctagaatattttcactactcccaaaagaaacctcgtatccattggcggtcactccccatttccctgtttccccaaccactggcagctactaatctatactttctgtccttatggatttgcctattctggacatttcatgtaaatggaatcacacaatgtatggccttcatgtttggcttcttttgcttagcataatgtttaatgaaaggtgtgtgttgcagcatgaagcagtaagtacttcattccttttcatggcttaattatgtatatattatatatagttttttttttttttgagataaagtctcgctctgtctagcaggctggagtccattggtgcgatctcagcccactgcagcatccgcctcccaggttcaagcgatcctcctgcctcagcctcccgagtagctgggattacagatgtgtgccaccatgcccggctaatttttgtatttttagtagaggcagggtttcaccacgttggcaaggttggtctcaagctcctggcctcaggtgatccatccacctcatcctcctaaagtgctgggattacaggtgtgagccaccatgcctggcctcatggcttaataatatttgattgtatggatatacatatatatttcggacatttgggttgtttccagtttttggctattatgaacattcacatacaagcttttatttaaccacttgctttcagttctttgggatatatacctaggggtgggattgctgggtcatgtgtaattttatgtttaggtttttgaggagctgccaaactggtttccacagtgcctgcaccgttttacattcccacctacagtgtacgatggttccaatttctctacatcctggccagcactgtactttctgtctttttggtcctagccattctagtaggtgtgaagtggtatctcattgtgattttgatttgcatttccctaatgactaatcatgttggaaatcttttcatctactggcaatttgtatatcttctttgaataaatttctgttcaaatcctttgtctagttttcagttgggttacatgtcttcttttgttgagttgtaaaacttccttatatgttctcgatgctagaccctcatcaaatatttgatttgcaaatattttcttccattctgtggtttgtcttttcactttttcatagtgacctttaaaacacaaaagttttaaatttaaaaatctaaaataaggccgacgtggtggctcacgcctgtaatcccagcactttggggggctgaggtgggcagatcacctgaggtcaggagtttgagaccagcctgaccaacatggagaaaccccgtctctactaaaaatacaagattagctgggtgcgtgtaatcccagctacttgggaggctgaggcatcaacctgaatcgcttgaacccaggaggcagaggttgcggtgagccgagatcacgccattgcactccagcctgggcaacaagagcgaaactctgtctcggaaaaaaaaaagaaaaacaaaaaaaactaaaataaattatttttttacatcagataggcaatgtgctgatgtcatagtaaggtttgagagcggcacatctcagacatgagtgtgaaaacccaatcgctgtgcttgtgaaccacaaaaggatcataagttttattttattttattttttgagacagagtcttgctctgttgcccaggctggagtgcagtggggcaatctcgattgaacgcaacctccgcctccccagttcaagctattctcctgcctcagcctcccagcagctgggattacaggcatgcaccgccacgcccagctaattttttgtatttttagtagacacagttttaccatgttgcccaggctggcctggaactcctgagctcaggcagtccacccacctcagcctcccaaagtactaggattacaagtgtgagccactgtgcctggcctaggatcaacatttttaaattttgataaagttcaggccaggcatggtgactcacctgaggtcaggagtttgagaccaaccagcctggccaacatggtgaaaccccgtctctactaaaaatacaaaaattagcgaggggtgggggggcatgcctgtaatcccagctactctggaggctgaggcatgagaatgacttgaacctgggaggcagaggttgcagtgagccaagatcgtgccactacactccagcctggacgacagagtgagactccgtctcaaaacaaacaaaaaaaaagttttttgatgaagttcagtgtttcccttccctttccctttcccttttcctttccctcccctcctctccctttcactctcatttcctttcctttccttttcctccctccctccttgcttgctttctctttcttccttccttccttccttccttccttccttccttccttccttcctttctttctttctctctttctttctttctttccttctttttctttctctagtcaaatgcagtagtaagaaagggggaaagaatagaacaagttcaatctgtaactcaatgtgaacaatcaattgagataactcactacgtttggaccagccttctttttttcttttagttccttgtgccttggtttaacatctaagaaaacattcctgaatgcaaggtcacaaagatttatgcctatgttttcttctaagagttttatagtttcagctcttacatttaggtctttggtccatttggagttaatttttgcatatggtgtggggtaggggtccaaattcattctttttttttttttttttttttttttttttgagacggagtcttgctctgtcgcccaggccggactgcggactgcagtggcgcaatctcggctcactgcaagctccgcctcccaggttcacgccattctcctgcctcagcctcccgaatagctgggatgacaggcacctgccaccgcgcccgggtaattttttgtatttttagtagagatggggtttcaccttgttagccaggatggtctcgatctcctgacctcatgatccacccgcctcggcctcccaaagtgctgggattacaggcgtgagccactgcgcccggccccaaattcattcttattcatatggatatccatttgtcccagcaccatttgttgaaaatacatttttccccattgtattgtctgaatcttgttctttttcactcaacattttgatcctgaaattgctgcatataactacaaatcatttcttttttttttttggtggtggtggcggggcggagtttcactcttgttgcccaggttggagtgcagtggcgtgatcccaactcactgcaacctccacctctttggttcaagcgattctcctgtgtcagcctcccaagtagctgggattacaagtgcacgccaccacgcccagctaattttgtatttttagtagaggtggggtttcatcatgttgtccaggctggtctcaaactcctgacctcaaatgatccactcaccttggcctcccaaagtgctgggattacaggcatgagccactgtgcctggcccacatcattcatttctttatggctaaaaaatagtatcctttgtataaatctgccatgatgtatttatttattctttgttccatacagattgggttgtttccagaagttgctattatgaacactattgctctgaactcacttgaacgtgcgtgcgtgagtttctctccagagtatgtgcctagaagtgtagtgtgtgcatgtgttctccaaagcgattgtcatacttatgcttctatcagcgatgtgtcagaactacgtttcagaaaacagttttaagcattctgtttgttctgtctctcattgaaaaaagtcattactaaaaagaaacaagtggtatttgcaagtgaaatttgccttttaggcctctaatattttattagcaagaattaaataagcaaaaggccaatagcttgagaacgtagtatgcaattagtatctctttgtttgatttattttattttttcacagtgaagacttaagtatctctttacattttaaaatattaatgtggaccttaaacaggtctttggctggttgaggtagtggtttgtttgtttttgagacagggtctcactctgtcacccaggcgggagtgcggtgcagtggcgcaatcacagctcactgcagctgcgacctcccaatcccgagtgatcctcccacctcagcctcctgagtagctgggaccacgggtgtgcactgccatgcccagctaatttttttgatttttttgtagcgatgaagtctcgctatgttgcccaggctggtcttgaactcctgggctcaagcgatcctcccaccttggcctcccaaagcactgagattgcaggggtgagccaccaaccgcacgggcctggtgaaggtttttgctgttagtaggtgagtctgcgtgttaattaaagcaacatcacaccagcctactattgctctcttaactagggtgtggagcaagtataatagagcagttgggctgcgctgggtggctcacacctgtaatcccagcactttgggaggccgaggcgggtggatcacaaggtcaggagttcaagaccagcctggccaagttggtgaaaccccgtctctactaaaaatacacaaattagccgggcgtggtgttgggtgcctgtaatcccagctactcgggaggctgaggcagagaactacttgaactcgggaggcggaggttgcagtgagccgagattgcgccactgcactccagcctgggtgacagagtgagactcccatctcaaaaaaaaaaaaaaatagagcagtttacagaattgggtatgaatgggaggtgggagtgcttccttttcttggtacccacctattagcatacagtggttatgctaagacagaatcctgcccataatgatgagacacctgccctatttcatgatctcattcaatagtatcatgtgaaagggttgaaggatgcagaattgggccagtagtgctcagaaccttgaaagagttggaaattctctctggagtggggcaaatctacagcttataaagaaagcgagttgtcctggaaagcgcagcacataggtcaccagggatggccagcaggaggtaaagaaagtctcctagaaggtggttgggccggggaggtgagcagcctgcctggtagagaagcatgttggaaagtgctccacctgggagctggggcccagggacagaatgccacttatgaggcatgagtgagggcaggagaaaggaggaagtgacaagatgccccaggcctaggggaacctgtgtcctagtaggtcaccaggccctatgttaaagaaacgggaacctgaagaccagaaggcaacttggtgtcaggaacaaggtaacgttatgattggttatcataactggggcacgagatcagagctagatggacttgctccttattcctcttacagagagtaataatgattttcatcctgggggtacttaataagggctaagcacttatgtatattaatttgtttaatctacacaacaatcctgggaaatagattctgttactgttcctgtgttacaggaactgggaaactgaggcacagagaggggagtggcagagccaggatttgaacccagatactctggctccagagtgcaagctcccttcccatggtactgcacttcttctggaaaaagcatggtttagggagtcaaacaggcttggtttctaatcttcatttcaacctcttactatctttcttttatgaccttaggcaagtcaacgaaattttctgtgacccacagtttccttatttataaaataagaagcatgagattcagatcacacatggaagtgcctcaccccttgcctggccctcggtagggacttagtaaatagccattaatactactcctacaaataaacctttccaaactgagcacaggacttggcctggagcccggggcagggtttaatgtgtgctgaggatggggtaatttatctaggagggatgagaaacatgggggtcaaaattccaagtagatactgacaaaactaggtgctgatggcacaagctccaggagccttggaattagccaagttctccaactcgactggagactaggttaaaatctcaaagacctcatccctcatccctgtaattagcctcttgattgcctgtgaccttaccttaaataagccctgatttaacctaaaagagaagaaatcagaacatgacaagatctgctgtttcatcttcttacatatttctctttcatttatttattttttttgagacggagtttcgctcttgttgtccatgctggagtgcagtggtgtgatctccgctcactgcaacctccacctcccgggttcaagtgattctcctgcctcagcctcccgagaagctgggattacaggcgcccaccaccacgcctggctaatttagtatttttattagaggcggggtttctccatgttgtccaagctgatcttgagctcctgagctcaggtgatcctcccgctttggcctcccaaagtgttgggattacaggcgtgagccaccgcgcccggccttcatatttctctttatacttaacttcctttttccttatctttcccatttgcaagttactttctagttcttatcgatcatttccttattactgttttttcctccttaatgagttggttgctagataataccttcggtgtttttgagaatctgagaatgatggaggagaaatggaaagataggaatagaaagagattacattaggaattaaatttcttgttcctctttttctgatatgaaaccaaattggaggttagatcatccagaaagagaattcagtgttttccagttttccaacctgcttgctcataagaatgacttggagtggtagatcttgattcagtcgttctgaggatagcacaaagaatttgtatttttagcaaacactctccatgattatagtattatatgggaattaaacttaaaccttctttaaataaagcccccaagtttgacccattagctcagctatagaattactgaatatttttagtatggcaatactgtcaagaaaaagcactttataatgtgcttaattttctttctttctttctttctttctttctttttggaaaagtttaaggctatataaaaaatagagagaatggggcttctcgctatgctcagcctgtgtgtcatcattactgtcatgctggccattgttctctgctgctgtgcccgggccctgaggcctccttcacctctatccccaccaccactatccagtcagtttgctgctgcttccgtggttcacatgaggcagatgaggagtttgatgcatgctgggtgacatgcttcaacaagccagagatagatgcctgggaattgcataaagaattgaacacacttgctggctatgacctggttccagaaccccaaatcattgatgttgcttcgcaggcatgcagacagttcgatgcttttcctagggcagtttgcatcctagaggttgttaaggacaaggcaggacctcataagaaaatgtcatccaagaactcagaccaactttaaatgaattgggaatccccactccagaggacctaggcttagacaaagtgtgaaccccagggacaagcgttccagggatttattggtattgctacttgattgtaaacactcccctggaaatgctgatgataacatgttaccttatttgaacacctttttctttattgaataccaaaccatgttatggtaacttggactttaataaaagggaaatgagtttgaactgaaaaaaaaaaaaatagagagaatggtgtgttggactcccatgtaccctcaacccagccttatcagttttcaaaccatggccaagtaagaggcacttttgaaagagaacataggaggagttaccaaacagtaaaggcagaaattaaaagcaactgtgcctgctttgtttagaatacccaaaacctggaaacaatccagatgcccaccaataggtgaatgcatcaaccaattgtggtatatcttttcaatggaatactattcagcagtgaaaaggaaatgaactatttatacatacaacatgcaagaagttaaaaataattatgccaaatgaaaaaagccccacccccccatatatactgtatgcatctatgtatataaaattctggaaaactatacatatgtaaaattctaaaggtctgcaacctgcattccaagggccaattccagcccatcacctcttcttgtaaataaggttttattggaacacgggcacactcaaggtattgcctatggatgcttttgtgttacaatggcagagttgagtagtggccatatggtgtgcaaagccaaaaatatttgtcaacccgcaggggttgaaacagacagtaaacaacacaaaataaatacaaacagataggaataatgacaaatcacagtcaatgccatgtcaatagagaatatctggggcaaaggggaaggtccagttgaattgaaatactcatcagtttctgagtgtgttctatagagtttttctgtctctgtgtctttgcacattctctcttttttatttttattttttgagacagggtcttgctctgtcacccaggctatatagtgcagtggtatgatcttggctcactgcaacctctgcctcctgggttcaagcgattctccatctcagcctcctgagtagctggaactacaggtgtgtgccacgaggcctggctaatttttgtattttttgtggagacagggtttcatcatgttcaccaggctggtctcgaactcctgaactcaagccatccaccctcctcagcttctcaaagtgctgggattacaggcatgagctatcatgcctgacctctttgcacattctcttgatctgttatgctgtttgttgccatctactgttgtcaaattctacctacccttcagggtccaactgaaatgccacattaccaggaaaggtttttctcattgtccctgccatacttcatttctcttctgcccttctgtagctcaggaccctctttaggtgtcactcccattagattgtaagtttcctaacaagacgcacgtcatcgtctccaaatcctttgggtcagcacagcctcttttatattaccagtctaagcccctttgtgtgacatttaaagtccgcctggactgactgttcagcctcatcctctgcccttcccttgtgtcctgggctctggccaaatcaaaccaccgttccccaaatgtactatgtagttaacttttaatattgcttctttttattgccttggttctctcaaaaatcagaattaatggaatgttggctattacaattacgtggacatggttatataatggccttggcgatgcccttaataaatgaaatctaaaatgttacattttttttggaacccagaaactcattctaattttattctgcctgaggctttatagcattttctgaagatcatgttgtactcttctttcgtctagatgatttggtcaacagtgataaagttccaacttagacttgataaatatgcaagagtcatgaaatatgaatgaaaacagtgacttttgaaaatcacgcttacctaaaaaaaaaaaaatcctgagtatggtttatatttactatgtgtgtaaaaatgtactgccattcttcattcttctttgttcgttaggttgaagaacaattgtaaaaattgaaggcatggcactaccgccgttatgtatagattaatgtggaaaatagcacgtggcgggtggctaatgactggagtcttacggacccaggtacttactgaaaaattcacttaattttggacataagacttggtcctttttttgtacataaatttaaatctccctttccttgtttacatgtattgctttttttttttttttttttttttttagacagagtctcgctctgttgtccatgctggagtgcagtggtgcaatctcggctcactgcaaccacaacctccacctcccaggttcaagccgttctcctgcttcaacctcctgagtagctgggattataggtgccagccaccacgcttggctaatttttttgtttttagtagagatgggattccaccattttgtccaggctggtctcgaacacctgacctcaaatgatcctcccgcctcagcctcccaaagtgctaggattataagcgtgagccaccgtgtccagcccatgtattgctattttatttacaatggagcattgtatattttacccactgtcagatggcagatgcagcgtatttctgcctgcatcccttggcccccacctcttatcctggttcccaggtgcagggatgctgttgcactggcataggttcctggcatatttgagaagtacaatttttgctgaaccacgttcctcttttatgcaacttggcacctatgtcaccattcaagaacaacttatatcaacaatcagtgcccttaaaaggaaatgctcacaacattcagcattctctctgtctctctttttttctttttttgagatggagtttctctcttgttgcccaggctggagtgcaatggcacaatctcggctcaccgcaacctctgcctcccaggttcaagcaattctcctgcctcagcctcccgagtagctgggattacaggcatgcaccaccatgcccagctaattttgtatttttagtagagacggggtttctccatgttgatcagactggtctcaaaaactcccgacctcaggtgatccgaccgcctcagcctcccaaagtgctgggattacaagtgtgagccaccacgcccggccaacattcagcattctcttaaaaaaaatttttttttgagacatggttttgctcttgtcacccaggctggagtgcagtggcatgatcatagctcactgaagacttgaactcctgggcttgagtgatcctcctgcctcagcctagtagctaggactacagggacatgccaccatgcttggctaattttttacattgttttgtagagacaggtcttgctatgtttgcccaggctggtctcgaactcctggcctcaagcgatcctcctgcctcggcctcccaaagtgctgagattacaggtgtgagcagccacaccaggtccacattcagcaccctcttgattcttgagcccaccatggtgtcagcaaggaaagagaggcagaggtaatttaacctacatataatttcttggttgccagcctccctgagtcttctccattgtccttcagatctgtagtgtttaaaggcctgaattgaatctcttgtattttctgtaaaattctgatattctctgctgtgtgtcatatttatatttgcacagctcttaagttatttctcaatcagctgcctcccagtagcacacctttgcagctggcaccattgaaaaggtttccctcagacatgggagctctgactgcttgaagtcaatgggggctgggtgcggtggctcctgtctgtaatcccagcactttgggaggctgaggcaggaggttctcttgagcccaggagtttgagaccagcatggacaacatggtgagaccctgtctctacaaaaaataaaaaaaattagctgggagtggtggcacacatctgtagtcccacctacttgggaggctgagatgggaggatcacttgagcccaggaggtccaggctgcagtggacgtccagccactgtactctagcctgggtgacagagcaagaccctgtctggaagaaaaaaagtcaatggaacaaggcagcgtattgaaatattctttccttgggaaatgtatgtcataaatccttttaccaacagatgatttggatctttaaggctcccaggcacatgactttattctcaggagatggttaggcagtagattaagatctgcttattgccttgagactatataaagctcccaatacctatttttattggagaccaaatttctaacttgttcaattggtctgcttatggcagtgctgctctcccagtcatgggagaagacagttttacatttaaatggaatattctaactttgcttagtaagtaaatactgacccaaagataaacaatgggagaaaatggaatttcagtgtttcatgcaaaaagttcctatcacaagggaatcgcagttttcattctttgggtaggtaggtagatttctccatgttctgtgaaactgtgttgttgcggggaaggaagcaaaagaacaaatcaatagctgaggatgggggcatattaggaatttttttttttctttttgagatggagttttgctctgtcacccaggctggagtgcagtggtatgtcttgtctcggctcactgcaacctccacctcctgggttctagctattctcctgcctcagcctcccgagtagctggaattacaggcccccaccatcacgccaggctaatttttgtatttttagtagggatggggtttcaccatgttggccaggctggtctcgaactcctgacctcaggtgattcacctgcctcggcctcccaaactgccgggattacaggcgtgagccactctgcctggccgtgagccaccccaccgggcctgaattttgcttaatagaatcatgatgaaaatgaatgcgcttgaccagagaaaatggacacttgtgatgacttgggtagtgttcagaaatcactcagcctgtgagaactttgtgcttcttaggtttggcttgatattacaaagctaccactggttacttttatgaaagctccccaggtaaggggcagaggacagcaacctgttggtccagattaacattcagtggtattaagcagagactgtggctttcaactataagtaaaagcatgcttgggggagaaggaggaagggagaaaaaaaaaaatgagaaagcagaaagatgcaacaggggttggcaaagagtcaggagcagggagtgagggggaaagtaggtacatgtggtggagaaatggaagctctcccaatggttccatcagttccaccacactggcacagattctagaagtttcctatttctggagtaggacgcagacatgatgcatttcctactaagacagatttctatccaggaaacatcatttcaagttgcagtgccaggctcgaggatccttctccgtcattgcttcaagtgtggtgggttcagtacctcctttaatgtaagagctggcccgtcttccctacctacttgggacactttctagttttgaccttaagtagggtatcaggaaaattccgagaaagggaagacactctttttcctgaattacagaatagaccaactcattagaaaaaataaattaaagaggccaggcgcagtggctcaagcgtatgatcccagcactttgggaggccgacgcaggcggataacttgaggtcaggagttcgagaccagcttggccaacatggcgaaaccccgtctctactaaaaatacaaaaattagtcgggtatggtggcaagcacctgtaatcctagctactcgggaggctgaggcagaagaattgcttaaacccgggaggtggaagttgcagtgagccgagactgtgccgctgcactccagcctgagtgaggctggagacccagagcaagaccctgtctcaaaaaaaaaaagagagagagagagaaaaccagaacccctttgtttcaaaaccatccacatctgtctatccatccgtaaagcacaaagttatcagagacaaatcatggtctcattttgcttcatgcattttggacctgacatgagtccgtctttgatccctgaggggtggtagaaacaagcaatgcttttcagagtgaagctaaaaaaggcactctgtggaagagaatatattttatagatcagtgattagtgagtcttttcatgacaagttttgtattaattatgatttgaaaacctccagtgcagggttctcaggaattactaagtgcccctgggtacagcaagaagcactggaataaagaatctcaatgtgtgaccaaatttctaaattcttgggggtgtacagaaattagccacttctattttctctctctctttctctctctccttccttccttcctccctccctccccctccctcccttccttccttccttcctcttctcttctcttttcttttctttctttttttctttcttgagtctttctctgttgccaggctggagctcggtggcgctatctcggctcactgcaacctccacctccttgggtcaagcgagcctctcactcaccctcctaagcagctgggattacagtcatccaccaccacgcctggctgatttttatatttttagtagagacggggttttgctatgttggccaggctggtcttgaactcctggcctcaagtaaactgcccgcctcagcctcccaaagtgctgggattacaggcgtgagccactgcgcccggcctcacttctgttttctacttgtgtttttatttccattgcatttcctgacttgtgtatattttctcgttgtagaagcacttagtgttttggcactcagacttactttccagtgtttcttctgatcaatcaatagccctttactcatactaactatatgtgatggaagcaaagtcaggaatgtctaatgtgggggcagaattcactatgaagctacttagaatttcaccagccatgaatgatacattatccatcatgttagctagaatatactgggctccagtctcttttgggggatctttagggtccttctgggtgcagaagggaagatgacatttcaggagatctctgcgcattccaccctggcttccttccttccaggtaggctgagagaaagctttcttcttgatggtgctagtgagaacttggcaggtggagcaggaactgttagtttttcactccctgttggagtcattcacacatacagctcatatagaagacggatgtcttttgtcttggtgccaaagacttgaaaacagagaacggtaacttttatttatttatttatttttgagatggtgtttcgctcttgtcacccaggctggagtgcaatggtgtgatctcagctcactgcaacctctgcctcctgggttcaagcgattctcctgcctcagcctcctgagtagctgggattacaggcactcatcaccacgcctggctaatttgtgtatttttactagagatggggttttaccatgttgcccaggctggtcttgaactcctgacctcaggtgatccacctgcctcggcctcccaaagtgctgggattgcaggtgtgagccactgtaccaggctagaatggtaacttttgaaacccatttttgttattctaaagtcttcacggtgtggtgttgggaaggctgggttgctgtgtcagatgggtaccctcaccccagttatggctgttctcacatccaattccaggaagcctcattcttgtgtggtcatagaaaagcaaccttaattttcctgtgtcttagtttccttacctcctagaaatgtggcaaagatgcagaatctgtttatttagtaaatatttatcaagttctgggaatacagcggcgaataagccaccaaatccttccttgatgggactcaccctctaacacagccaaggcaatgagagaccttccaggaataacattgagaggcaaattatgcatgtaggtgacacatgaggccaacaggaaatgacctcgaattgaagttgaaatttacagtgcgagatgagccaagaatctgtgaacccttagaactcaggcaaggtgagctggtgtgacttgcaggaagtatgactcaattgtgactgtacccaagaaggcttaaaccacatcatctgaaagaaggatgtgccaacatacgcttccaatgactaaaaggaggggcagagggaaaaacaaaacagcatgttcccaggcccatcctaggaggaaggaaggctattaatacattcctttgacattgtctacttaccattgcatagagttggaggtgagtggcatatggagagacagagatttggagacagactgagtttgaatcccaattttgtcttattaggccgtggacaagtcatttcaactctctaagcttcaatttcctcattatttattttttaaaatagagatgaggtcttgctatgttgcctaggctggtcttgagctcctgggctcaagccatcctcttgccttggcctcctgagtacatacaggtgtgagccaccacacccacctgcccagccctagcttgctcactgtctttctttttttcttttttttgagacagagtcttgctctgtcacccaggctggagcacggtggtgtgatctcggctcactgcaacctctacctcccaggttcaagagattctcctgcctcagcctcctgcgtagctgggattagactactacactcggctaatttttgtatttttagtagggatgggtttcaccatgttggccaggctggtctcgaactcctgacctcacgtgatctgcccacctcagcctcccaaagtgctgggaataaaagtcgtgagctaccacgccggtctagcttactcaaacaatgtctagtttgcagggtagtgtatgtacgtgcctcagtgtctttggtgtgatatacacttagtaaatgttagttcagctctaacagactcatctgagattttgattctgtaactcccaagagttcagtatgctagcatttttttttttttaacatgaggaagagttgggtaaggaagagctgtgttttaattgcattacggctcaactgctaactgttttgatatgttgaacaaagtccgttgattcttcatggaggagtgcttgctggggagtgtgagtcagcacgtctgcgttattaacttgttcggaagctttttgtggcagattgattttaaaagcccccaaggaaacagaggattttatttaatagaaatattgtcagaatgacattgagatttgggtttagctttcaaatcactggatacaagttgaatcaggtcttttctctgacagatattggaaacatggtgtgttggagaaatactctccattgcctggcagggcccttaccttgggagagggggatgatatttgcctggagcaccccggtgaccccacctagcaggcctgactttctaaaggcaaggatgtgggcttggtacagagaggtggcgaaacctgaacattagtattttcaaatctgattactagtattttcaaccgacctgactaggcgcaaatccatgctcatttaaatgaaagtctacctgaaatcatgcctcactgcaaccatgcacttctgggcttaagcgatcctcctgcctcagcctccctgaaggtccacctgcatttgaataaggatggatgtgcgcccaggtatgtctttgtgggtttccatcctatagttctggagcaaaggacaaatggaagaaagttgctaaagaaaagaagagcgtttctgtggctccttcaagagcagttacagatttctgtcctgaagccaggagggaatatgtggcccaggtcccacagtggagagttgcaatgctccctcttgggcatctctgtcctcatttggattcagggctgaaacttcgggatcagtttcacagaagaggtttcaagtagatttcttgcagtcctgaaagtcacacttctctgaaattggtttaacaccaatccaaaacctattggtgttcctgttacattttacaactcttcatatgccacttaagaaatgacctctctagaattgtgactccagcctaggcaacagtgggagactgtctcaaaaaaaaaaaaaaaaaaaaaatagagttgaggatgaggagctcaagaataaaagtgagatgggatggacagagaaaaagcaggaaaactagcgaatggtatggtagaagccaatagagaaaggactttcaaggtggagggagagaatttaagagttgggacttctcttccagcaagaagaggaagaatggcataagagggactgtgatgtaggcactatgtcaccatcgtatttaatccaaactataactatgcaagattaccacttgaccttcaagaaaactgggctggctgggcgcagtggctcactcctgtaatcccagcactttgggatgccgaggcaggaagataacctgaggccaggagttcgagaccagcctggccaacatggtgaaaccttgtctcttctaaaaattcaagaattagctgggcgtggtggtgggcgcctgtaatcccagctactcaggaggctgaggcagaggaatcgcctgaacctgggaggcgaaggttgcagtgatccgggatcgcactactgtgctcctgcttgggcgacagaggaagactccgtctcacaaaaacaaacaaacaagcaaatatacaaaactgagctgaggagacaattcgacaattcatgcagtcaataagtaggttgcagaggttggagtacagtggcgtgatcggctcgctgcaacctccgcctcctaggttcaggcgattctcctgcctcagtgtcaggcctctcagcccaagctaagcatgtgaccttcgtgtatacatccagatggcctgaagcaactgaagatccacaaaagaagtgaaaatagccttaactgatgacattccatcattgtgatttgtttctgccccaccctaactgatcaatgtactttgtaatcttccccacccttaagaagtttctttataattctccccacccttaagaatgtactttgtgagatccaccccctgcctgcaaaacattcctccaaattccaccgcctatcccaaaacctgtaagaactaatgataatccaccacacttcgctgactcttttcggactcagcccgcctgcacccaggtgaaataaacagccatgttgtgcgcgcgcgcgcgcacacacacacacacacacacacacacacacacacacacacacagagggagagagagagagaagtgacctctctagagaaagaagaatcaccatggtatgggagaatgaacccctcagaaatggtcacagcttattcaagtcctaaacccttgctatgggcaagggttgacaaactttttttttcttttctttcttcttcctgtcttctttcttttcctctctctttctctcactctttctctcccttcccctccctccctccctccttccttccttctctctcattcgctatttcttttctttctttcttttttttttagagacagggtcttgctctgtcacccgggctggagtgcagtggcgcaatcatgcctcattgcaactttgcactcctgggctcaagcgatcttcctgcctccacctcccaagtagctgggacaagaggcacacaccaccacgcttggctaattaaaaaaaaatttttttttttaaagagatggggtctcactgtgttgcccaggctggtctcaaactcctagccttacgtgatcctttcacctcagcctcccagagtgctgggattacaggtgcaagccaccatgccaggcagcaaagtttttcttaaaaggccagaaagtaaatatttttgcctttgccgatcataaggtctatgtcacaaccactcaactctgccattgtagctcaaaagcaaccatagacaatagggtcaaggagtgagtgtgactgtgtttcaataaaactttatttaacacataggcctccctcctgcaatcccttttgctgatcgcttcatagaccatcatacacttcctgtgctctttggagcttgaaaatcatactttggagtaagaaattcttttgaatataaattacatatgtttggctgtggagaaataggaatgcttttacactgttggtgggaaggtaaattcgttccaccattgtggaagacagtatggggattcctcaagactctagaaccagaaataccatttgacccagcaatcccattactgggtatataccctaagaaatataaatcattctactataaagacacatgcacatgtatgtttattgtggcacgatttacaagagcaaacacatggaatcaacccaaatgcccatcaacgatagactggataaagaaaatgtggtacatatacaccatggaatactatacagccataaaaaggaatgagatcatgtcctttgcagggacatggatgaagctggaagccatcatcctcaacaaactaacagaggaacagaaaaccaaacaccacgtgttctcactcataagtgggagttgaacaatgagaacacatggacacagggaggggaacaacacacaccggggcctgttggagggtggggggcgaggggagggatttagaggatggatcaataggtgcagcaaaccaccatggcacacatatacctatgtaacaaaactgctcattctgcacatgtatcccagaacttaaaaataaaaaataaattacatatgtttagagaaaggaagcttccatatttatgtatcatcatgatttttttaaaaacttatttaatttgcatacaaatttgttccacatttgtttcctgtaaaatggattcctcataaatgcttggtaagagtatccatgtttgatgtgaaacaaactgatgatgcttgaattcctgtttactctgaagttcttttcacatgctggtgagttctgagcaccatgcttacatgcacctctcctttgcagcaaacataagttttgaggtccctgtgagtcctaatggcaccgaggtgctgtctcaggtgaccttctcctaatcctgaaaaagtctccatgattggccctggaggagttctcctggttgtctggaatgagttcatactaatagtcagggctctgggcattgtgagaccctggctactttctttctttcccacaatgtatactttctcactatttatttatttatttttttgagacagagtctcgctctgctgcccaggctggagtgcagtggtgtgatcttggctcactgcaacctccacctcccaggttcaagcaattctcctgcttcagcctcccgagtagctgggaccacaggcgcccgcaaccacgcccggctaattttttttgtatttttagtagagatggggtttcactgtgttagccaggatggtcttgatctcctgaccttgtgatcctcctgcctcggcctcccaaagtgttggtattacaggcatgagccactgcacccagccatgctttctcactatgaaaacctcctcggactcctcggactcctcacaagagtgagtgagctggatttgctgtattttcaaagtcatccttcattacacatgaacattggctgcacccgagcttggctgtgaactgattattctcaccagggcctgttaacacaaattccatcactcctacagctaaaaataaaccatatttaacaagtagaaacaaaactccaggcaaatacatcatctgatttgatggaatctttgttgaaaatgttaatggtggaatcagatgcttacctttaagatgggagattgcattccttcgtgagcaaggtgcctagaaatcaattccaactcttgatatgatcagagagattgatggatacctaagtgtctgaaatgataatagttcatcttgtctaagggcattcccccatttgtggcacattgtccttgacgatcagtcttctatttattttattattttattttttacagatggggttctcgatgtgttgcccacgctagagtgcagtgactgttcacaggcaacatcattgcacactgcaggcttgaactcctgggctcaagcaatcctcctgcctcagcttcttgagtggctggcactacaggcatccaccactgtgccaggctcagtcttctatttaaataatgctgctactttagagggtttaggaatatttagtgtttacagctagtgtctctgtaatatgaaaacatactgtgccttggctgggtgtggtggctcatgtctgtaatcccaggaatttgggaggccgaggtgagaggatcacttgagcccaggagttcgagaccaacttgggcaacataatgcccatctttttaaaaaataaaaaacaaaaattagcagggcatcatggtgcacacctatagtcctagctaatcgagaggctaaggtgggaggattccttgagcccaggaggatgaggctgcagaaatcgcactactgcacttcagcctgggcaacagagtgagaccctatctcaaaaagaaaaaaaaaaaaaagaaagaaagaaaacatactgcgcctagcaatacaaatagtgacctgcgagtaatgagattatagatgattttaaacattcttcttgataattttcctgtgttttacaaatatttaataatgaatatgtactactctaagaaaaacagtacaaaggttttcaaagttttttgacagtcatttacctgcagtaagtacgttatacatcccaaccccatataaactagcatttatgtatttataaacttaaaacaaacattagttaaccatttttttctacttgtcttgcttttttttttttttttttttttgagacggagtctcgctctgtcacccaggctaaagtgcagtggtgtgatctcggctcactgcaacctctgcctcccgggttcaagcgattctcctgcctcagcctcccgagtagctgggattacaggcatgtgccaccacgcctggctaattttgtatttttagtagagacggggtttctccatgttggtcaggctggtctcgaactcccgacctcaggtgatccacctgccttggcctcccaaagtgctgggattacaggcatgagccaccacgcccggcttttttacctacttgtctttacctcctgatgttttctgtttttctattctattttatcaaagaaggaagaaagaaaaaaagaaagaagaatattcatgtattgaccaggtaaaatgatttcatgaaccactgatgggtaaattgaaagctagtgattataggacagtggttgccagtcttgtatttcatgggtcagtaaaatttaaaagaaattttggggattgatgtaagatcatctgtttttcatgttgcaaagtaaggatgttttaaaacaaggtagctgggcgcagtggctcatacccgtaaccccagcactttgggaggccaaggcaggtggatcatctgaggtcaggaattgagaccaacctggccatcatggtgaaaccccatctctactaaaattacaaaattagctgggcgtggtggcgattgcctataatcgtagctactcaggaggctgaggcaggagaatcacttgaacctgggaggcggaggttgcagtgagctgagatcgtgccactgcactccagcctggatgaaagagcaaaactctgtttcaaaaaaaaaaaaacttacaaagtaattatttctaccaccattattcttttattcatttgtcatttaaaatcttgtttttatgaattttatgatttgagagaattttcatgtcaaaatatcctttcttttctgaaagaatattttagcattaaatattagaaggaatacaatttcagtagttatgtgatgaataaatttagctttctgaaaacagaccgcacttgctttgttttttccatttggcaatgaacctgtgcactagcatttaggaatcatttaggaattatcagtgtagtggaaacagccttgctttgaaacaacacaattttacttccagttctgaatcatttaatttttctgaacttctttttacccatctgcaaaagaggaatctcagaggtatagcaataaggtttataaagggtttaagacagttctgaatgcgcaggagtttatagatggtaacgtcttttctctggatcattaattctccttactactctgtgattttaaaaacttagaatgttggctagtgtggtggctcatgccagtaatcccagcactttgggaggctgaggtgggagggtcacttgaggtcaggagttcaagaccagcctggccaacgtggtgaatccctgtctctactaagacacaaaaaaattagtctataatcccagctacttgggaggctgaggcaggaggatcgcttgaactcgggaggtggaggttgcagtgagctgagatcatgccactgcactccagcctctgtgacagaacaagactctgtctcaaaaacaaaaacaaaaacaaacttagaatgttggccagtgtggtggctcatgcctataatcccagtgctctaggaggcagaatgctctagagggtggaagcgggaggattgcttgaggtcaggagtttgaaaccagcctaggcaaggtagtgagacctctgtctctaaacaacaacaacaaaacagctgggcgtggtggtgcacacctgtcgtcccagctacttgggaggctgaggtgggaggatcagttgaggccgggagttcaagatcagcctgggcaacatagtgagaccctgtctctaccaaaaaaaaaaaaattagacatatgcagtggcatgtgtctgtagtcccagctgctcaggaggctgaggtgggaggatcccttgggcccaggaaggttgcagtgagaaatgatcacaccactgcactccagcctgtgtgacaaagcaagaccccatctcttaaaaacaaaaccaaaccacacaacaacttggaatgttgaaagaagttcattatgtgtttccattttatgatgaactatttctttaatttttactctttttagttactgtttctttttttttttttttgcgatggaatattgctctgtcgcccaggccggagtgcagtggcgtgatcttggctcactgcaagctccacctcccgggttcaagcgattctcatgcttcagcctcccgagtagctgggactataggcgcccaccaccacacccagctaatttttgtatttttagtagagacgggatttcaccatgttgaccaggctggtctcaaactcctgaccttaagtgatccatccgcctcagcatcccaaagtgctgggattacagagtgagccaccgcacctggcctcatgtcttgtcttacctacggctttccccctctttctgcgttttctccaccctttaccgctgagtcagcctctgtataccattattcatgatgggaactcagcttgtctgacagttggttttaaggcacaattagaaaatattccttgatagtacaatgagtttgcagtttttaagttgtggttttggccagagatattaataagggtttggacgttgagtggaatactaagaataagaaaggggatgtgcttaaaatacatctcatgtgccttctgtttaattacacggtaatttgtaaaagagactggtttctgtggccttgaatactaatatagactttccctcaccacagcttatcttcgagtcataaacacagaggcatgcatagttcacacatctccatgtattttctgtttccaaggaagatatgatcactctgaagaaccaaaagatgagtcactctgaaaacttttcttcctttgtcttaatgtcatgactgtcttaacaattgactgtgtttatttcagcaacatttatctttagtctcttctctttggctcagtcagatgttttcagtttcacccagcacggaccacagccatattacctcctatatcccagtggataacttctgcaggaaaacttcagctacttgacactcttgggaaacgagctgggtgttcctgataagaaaggtttaccagaatcttgtaaagatggtttctctaataatagctaacatatttataagcgtgctatgttttagaacatgggtgtccaaacttttggcttccttgggccacattggaagaattgtcttggaccacatataaaatacactaacactggccgggtgcggtggctcacgcctgtaatcccagcactttgggaggccaaggcaggtggatcacgaggtcaggagatggagaccatcctggctaacacggtgaaaccccgtctctactaaaaatacagaaattagccgggcgtggtggtgggcacctgtagtcccagctactcgggaggctgaggcaggagaatggcgtgaacctgggaggtggagcttgcagtgagccgagcttgcagtgagccgagatcgcaccactgcactccagcatgagcgagagagtgagactccgtctcaaaataaataaatacataaataaataataaaataaaataaaactaatgataactgatgagctaaaataaataaataaaggtccgtgtataatttttgtgatatctgccaccacagataagccaaaaagtcctcttattcaaagggttggacatggctgtttcagtaacttcattacaggctttgtgaacattatctcatgtaatcctaaaacaaaacaaaacagaacaaaatgactttccctgtctcgatttcctgagtgatctttgtaaacatcagctattacagtgtgctcttttgtgtagatttcaggtgtatgtgactcttgtaagcattcagcttaccactgtttattgagtgattattatgtgccagatacagctctggacacaggtgtgactaaaacaaactccctgccctcaaggtgcttatattctggaggtgggaggaggaccctgacaacagcatggaaatatacaaatataatataatgtcaggtagccacaaatatagcaggatatagggacagcgagtgggggtggggagagtggtggcggaagacccttgaggaggcgacagttgagcagagacctggatgaatcgtgggagcaaggcttgtagatatttggcaaaagagccatttgattgtgacttacgtggttctccctcttctgctttctatagttttcctgtctcctggcagtcagtgccaggaaagaatttagttgggccagaccaagggaagccagacctagaaaggaggcaaagctacaggtgcagagcagagattgctaaggtcttagccgcgggctgcgggagcgagcctgggcgggcgggtaaggctgtggaaccggagtctggagagtctgctggctgcgcacaaacacggctgtgcttctgggcagatgaatggagggcaagccagccccgggcagaagatagaacagagaggaagctggggagccgggtgcagtaactcgaaatcccagcactttaggaggccgaggagggcggatcccttgaggctaggaattccagagcagcctgggcaacatagggagagtctgggtgtggtggcctgcgcctgtaaacccagctactcgggaggctgaggcagaaggatcgcttgagcataggagtttgaggctgcagtgagctatgattgtgccactgtgctacagcctggatagtagagtgagactccatctctaaaaaatagaaataagaaaaagaggaagccaggtgcaggctcaggaggctgacgcaggaggatcacttgaacccaggaggctgacgcaggaggatcactggaacccagcagtctgagactagcgtgcaaggatcacccctgtgaatagccactgcactctagcctgggtgacatagcgagactctgtctcctcctccccataataataataataataataaagaggaatctggtgctggcatagaggtacaggctggatgggagggtggtcaggatggggcaaggggccgagaccacaaatggtcctgctcctggggcttagaacgggacctggttctccagggaggtgaagaggagcaaggccagagctcagcagcagaagctgtggtttaagagagaggcttgattatagatgttaggaagtcaagagcccagtgcctagaacctgggctgcagacggggaatgaggcttatggctccgtaatggtgatgtaatgctgacacctcagctgtggcaccacagagtcctgtgttacccctccctgtgcccacacaagattaccagaaactactttgcatcccattgaatgcaatctgctctgtgcctcttttgtaaaatctgcccatttacacatggtgttgccaccccagcctgggaactgagcagcaagaggaagcctcccacccgccccactcccaagtagcgtttccttttccggctcccacaggcccattacataacctttcttagggccctctgcacagagctgtaatctttggtagaggggcaggctgtgctttagaagcccggagctcaggctgggcgcggtggctcacacctgtaatcccagcactttgggaggccgaggcaggtggatctcttgaggccaggagttcaagaccagcctggccaacatggcaaaaccccgtctgtactaaaaatacaaaaaaatttgccaggtgtggtggtgcatgcctgtgatcccagctactcaggaggctgaggtgggaggattgcttgagcccaggaggtggaggttgcagtgagctgttgcaacagggaacaacagagtgagactctgcctcaaaaaaaaaaattaaaaaataaaaaaataaaaggccaggctaggtggctcacgcctgtaatcccaacactttgggaggctgaggtgggtggatcgcctgaggtcaggagttcgagaccagcctggccaacatggagaaaccccgtctatactaaaaatacaaaaattagctgggcatggtggcgggcacctgtagtcccagctactcaggaggctgaggcaggagaatgacgtgaacccgggagatggagcttgcagtgagctgagatcacgccactgcactccagcctgggtgacagagcgagactccatctcaaaaaaaaaaaaaaaaaaaagaagcccagagctcaagatctggtcagactccctggtttgaaccttggctcctcttgggcaaattacgcaacctcagttacttcatctgtaaaacggaaattataatagtacttacctctgcaggattcttgtgaagataaaagccacagaacagtggctgggccccagaagtgttagtgcttttgacgtttctgtaaccttcactaaacgtgacaccctccggggccattgtaggcatttttgtaccctcagtgtctaacatgttacccagcaggcacatggattcattcaacaagtatttattgaatgccttcttccaggccctgggatgcagggacatagccaccaatgagacaaactcctgcccccatggggctgacattgtgctgggggagacagactgtaagcaagtgaacaaggacacaaataatacagtttcaggccaggtgcggtggcctacacctgtaatctcagcactttggtaggccaaggtgggcagatcacgaggtcaggagttcgagaccagcttgaccaacatggtgaaaccccatctctactaaaaataccaaaattagccaggtgtggtggtgcacatctgtaatcccagctactcaggaggctgaggcaggagaatcgcttgaacctgggaggaggaggttgcagtgggccgagatcatgccactgtactccagcctggacgacagagcgggactttgtctaccaccgcaccctccccgccaagaagaacaatttcagctagtgataagtggtataaaaaaataagttggggtcctgtaatcgagtgacctaagatgtgtgagatacatggttggtggtttttttgtttgttcctttgttttactttttatttttttgagatacaatcttgctgctctgttgccccaggctgcagtgttgtggtgtgatcatagctcactgcagcctccaattcctgggctcaagggatcctcctgcttcagcctcccaagtagctgggactacagatgtgtgccaccacacccagccacccagctaatttttaaattttttgtagagacagggtctcactttcttgcccaggctggtcttaaattcctggcctcaaaggatcctcctgcctcagctgcctcccagagtgttgggattacaggcctgagccaccgtgtctggctgggggtgctattttaaaaagaatggacagaaaatttctgcgaggatttgacgtttgaacaatggtcttatctaagcgacaatctgagagacagctgtccagacacagggagcagcaagtactagcatggcctctttgtgtttgagccaggagaggaataaaggtgagggtgagggaggcaagaggtaagcagaaggtagggaggccagggaggggaaggagggtgatggaacgaacgtaccggacagggcgtggaaagcgttcggggcctggctgggagtttgggatatgtcctttttgcaatgggagccactgagagttctaaaaccagaagtgacataatctgattcatgtttcttggctgtgtgcagagctttgcaagaatggcaacagggataaaagtcctgagaccagggaaaacccaagggtcttggatttgtgtggatggctgaggtaaaggagactcattccatggccttttctggaaagctgggtcatctgttaccagttttattgattgtcttctgtagcaggttgaatagtgtcccctcaaaatctgtgtctgcctggaacctcagaatctgattgtatttgaaaataggggtgttttttttttttttttttttttttttttgagacaggatctcactctgcttgcccaggctggagtacagtggtgcgatcacagttcactgcagccttgacttcccaggctcaggtgatcctcccacctcagcctcccgagtaactaagactacaggcttgcaccaccatggctggctaatttttgcatttttagtggagacagggtttcgccatgttgcccagactggtctcaaactcctagactcaagtaatccacctgcctcggcctcctaaagtgctgggattacaggtgtgagccactgcacctagccggcagtagggtttttgcagatgtaattagtgaagggcctcaagatgaaataatcccgaaattagagtgggacctgtatccaatgactgatgtccttataggaaggggagcggacatagagagacacagggagaagatagccccttgaacatggaggcagaagttggggtgttgcagccacgagccagggaacgcctggggccaccagaagctggaagaggcaaggacagatttcctccagagcatggccctgctgataccttgattttgggcttctaccctgcagaactgcgggagaacacatttctgttgctttaggcacttggtgatactgtgtttctgcagccctaggaaactaatgcacctcctaagcatcactggtttcttaggaatatttgcattggggtgcaggcatgagagaggcctcatcaggaagactggccattctatagaccttccttaagccctggagaggtgggtggtcttaccaggaactcaaaggagctctaagatcccagaggaggtccctgagaacgaatgaacaaatgaatgaatgaaagggcccaaggccgagtgcggaggctcgggcctgtaatcccagcactttgggaggccgaggcgggcggatcacttgaggtcaggagttggagaccagcctggctagcatggcgaaaccccatctctactaaaaattacaaaatttagctgggcgtggtggcacacatctgtaatcccagctgctggggaggccaaggcagagaattgcctgaacctgggaggcggaggttgcagtgagcggagatctcgacactgcactccatcctgggcggcagagcgagactctgtctcaaaaaaagaaaaaaagaaaaaaaaagaagagaaaagaaaaaagaaaaacaaagatcctaagacagggctgtgtctgaccttcaggtcactcaatagccctagccatgaacgttgtaattgaccctctgcagcacatagacctctagtcagtgcagccaccatcattccgctgtgtgccttctaagctgttctgggttgtaagatctttgttagaatttggataaagagaacagagttctaagtgactttttttttttttttttttctgagacagagtctcgctctatcgcccaggctggagtgcagtggtgtgatctccgctactgcaacctctgcctcctgggttcaagagattctcctgcctcagcctccccagtagctgggattacaggcacctgtcaccatgcctggctaatttttgtatttttagtacagacagggtttcaccatgttggccaagctggtcttgaactcctggcctcaagtaatctgcctgcctcggcctcctaaagtgttgggattacaggcgtgagccaccgtgcccagctgggcctaagtgactttctaatgcacagaatgtgtgaattttagaatatgatcttttaccatccagttttctggactcagaagtaacttttccttcctctcttttaaatgttcattaggtcaaattagaactgaagaagcaaccctgaggtataatactctgccccagcaacaaaaagcagtactgctgctgacttacggctactattctgagttgaaagtgctgaaaagaaaactccaggccatgcgcatttaatttgattgtaatcctgccagagatccacctgctttgctcccatccgtttcccttggcctgtcctgtagaaagggactgcaattgagcacttttttaaattaaaaaaatgacctgcactctccacaaaatacaggtccaaatggcagtagcttattggtcatcagtttctcctaggaaacctgggccacaagtttctggttggtttcggacacacagtaggtgctgaattaattaaaggtgtttctttaattcagcccagaagcatctgatttgcttaggaaattgattaggcatatattacctggatgatgtcaatttctatgtaaccatttctctcctgtgtaattgatgagcctcctaatgttgattttattttattttaccaagcactgtatttagttaataaaaaatacagaataggattcaaaacagctgtgtttgctgttggcatggccgtcaccctcctaatacctgtgcatgtcataatagactacatttgcagaaacaaaaggttaggaataaaaagatgacttttgtccctccagctgccagtgacaacccacagcctcagcttatggtatttatttaatcttgtatctgtgatagggctctgagacacttctgtgaagcagatgtttgaagatctgacaattatggaagaaaatttctcatagaaaaagatatgttctccagccttgggcgggggcctgacattactcttccacatttcactcattcatttattgaaaaatgaaaaattatatatatttataatataccaggtgatattttgatatgtgaatacattgttgaattattatgttaagctaattaacatatctctcaccttacatacttattttttgttgatgagatggacatttcttttttaagtatgcttaaatgtgttcacggattgtgtgaaatttttggcatcccgtttcttgatataccaccttttgccacatttcttgtttatatagtatgtatctcagccggtgatgaatcaaggaaaaagataaagaaaaacaaacaaacaaacaaaaaagcaaacaaacaagttaaaacaaacccaaaaccttctttcccagtaggcagtaatttgggatgtaaaatgtatgaggtaggcaggaggaagatgaaaagtctgtctgaaatgagaactgtctgttggcttaattcaggtgatcacagattgtctgtagccttgagcaaagcctagagaatagtgaggctagtaaaacactagcccttgggctcaaaatttaagatggcaccaaaaaactaaaaatcagggtaaataatattttgatgcaatatttttaaaaaataaaaattaatgcacaatactctacaatgaacaaaatatcaaaatgctaaagacaggctctaaccccgcactggcaaacgcaacctcacttgtctccttctaatcctggccttgacccctaataacaaaaagtaagatcatctagacctcaaaaggaaaagttgctagtccctctaagccttcgtttgctctgggtttgaatccaaactctgttatgaccaacttagtgaaatcaggcaaattactcaacctctgtaacttccttttgaaaaatggagatgttttctcttgcaagactttttatttatttatttatttatttatttatttatttatttatttatttatttgagacagggtctcactccattgcccaggctggagtgcagtggtgccatcatggctcactgcagtctctacctctccaagcttgggtaatcctcccaccttagtctcccaagtagctgggactacaggcatgcaccgtcatgcctggctgattttttttttgaaaaaaaattttttttatagggataggggtcttgccatgttacccaggctggtctcttaactcctgggctcaagaaatctgcccacctcagcctcccaaagtgctaggattacagacgtgagccatcacgcctaacctcttgcaggacttttggggtggtttaaaaattacgcctgtgtagcactgggaacattatgacacccaataaataccaaataaacaacagctttaaatattataattcataatgattcacagagtattaagatccccaggcgatgcaaccaggtagtacctaagtgtatcagtcttgggtgcatctgtcagggttaacctggctttgtttttaactttacaggacatatcagagtatagctattgtgcctgtgctttgaacactcaaacatccgctcaactgctaagtaactgatttcctgtttagtcacagctccttgtctgggaccagccactggcagcaaattgtcatcttctgtatctccctctcaaagcaactcagccttctgaagacgtgtagaagttaggtctcgcaggcttgtatttattaagcccccccccgccacccatcagtccccagttattttgagtgtctcaaacgcatttcccacacctgatgattcatctgaggacgactcacccttgttgtcactgacactgtccacagcccagagctcagcctctgatttgctcggcagagatggggctatgtacatatcgtgtgagacggaagctaacataagcagaggagaaatcacggaagcaaagtgaagtgggaatccagttaatacttggaacagaaaactggaaagcagctcattcattctctccgattgtaaaaggcggatggaaacaacacttttgtcagcctttcttctaatccgatcacagctgtaaagaccataaagccaagccccgacgtcaattattcttctccctgttcctaagaatgtgaaattagatggggaaaagtgacagaagagtgtcactaaaataacttattacactttgagggtcttagtcgtcattaatagttgttactttttgaatattcatcagtgcgccctgctgttcggcaagagaggctgtatgaagtaggaactgcacacgcctggcttcagtcatgtatgccttggatttaagctcttcttttccacttaattagttaacaggaacttactgagctgggtgcaaaatgatacagaagaataggagaatgggattgtaacccctgaagcgtttgtgatttagttgagtagaataaactctgctgagcccaagctgagcctcagcctcatgcacctgctgtatttccacattctttcatttctgccctagaaatgttgcttgaatctggtttctcctctttaaccatctaaacttttactattgctttaggactgcctctcctcatttattgctatgttgattgcactgccctgccaaaccatattggagctggatcaggggaaaataagcatatatatatatatatatatatatatatatatatatatatatatgcatgaaaatatcctcccatattgtggaccaagtggaaaagttaatgaagctctacaatgaaaaaaaaagttgactatgagtaaagtctcatgttgtccaatctgtaatcctattattgtcaaccctcgtaagcccgcccagtggatgaggtggtgggagatgacgagggtgggatgggcattctgcagccagtggggaagaaggcagggccctaaaacaaacaagaacaagcatatctttatttagaatttggatgtattttcatcgtgaatttcctttgcattcattttgattaaaaaaaaatgcattatggctgggcgtggtggctcacgcctgtaatcccagcatattgggaggctgaggcaagtggatcacttgagcccaggagtttgagaccagcctggccaacgtggcaaaaccctgtctctaccaaaaatacaaaaatatatatatatattagctaggcatggtggtgtgcacctgtagtcccagctactttggaggatgaggcaggagaattgcttgaaccaggagacgaagggttgcagtgagctgggattgcatcactgcactacagcctgggcaacagagcaagactctgtcccagaaaaactaaaaaaaatgcattaaaataatatttatctgtattgctgaggtttgaggcaccctcttaaattttacacctaggcaatacctccagctctcacactaatccaggctctggtctattacaaaagtccccgcgggctctgacctacacagctgccagttaccttcctaacagacgaccagtgatcatgtcactttcttgttaatccagactgctgggagcgaaaattcagccccctcggtttggcgttgaagcccctttacaatctggcccccacctaacccaccagggcgcctgccctgtctggccctgttcccacctctcttgcctcatcaaacttctgccagactgcacctttgtccatgctctgctgtctgcctgaattgtgcccctgtctcctgaattgtgtctccaagccccttcacctaaaatattcctgttagctctcaagtttcacctcagatatccctgactggctgggcagacttcttagactctcgcaagcaggcttctttgttctgttttcccataggaaattgttcgtttccactcaattcatatcttggtggttgcattcatttttcgactgtgatttatctgtttaccggtgtccctagttccactgccagctccttgaggcgagcaaccggggcttttcatgtctaatgaataaatgaatacaatttgacacagtgaaaaaggcaggaacagcaaccataaaaaatccatgaaaaacaaaagcacagaggacaataggcagagaggacactggtctttttttttttttttttttgagggggaattctcactcttttgaccaggctggagtgaagtggtgtgatcttggctcactgcaacctctgcccccagggttcaagcgattctcctgcctcagcctcctgagtagttggaattacaggcgtctgccaccacgcctggctaatttttgtatttctagtagagacggggttttgccatgttggccaggctggtctcgaactcctgacctcaggtgatctgcctgcctcagcctcccaaagtgctgggattacaggcgtgagtcactgcgcccggccgacactggtcttaaaatcaggagaacctggatttggcttttggtcttgtcattagccagctttacaactctgtcattattttcagattttttactatggaaactttaaaattgtagcaaaaatagaacagcctgatgaacccacatgtacccatcatccaactagaacaatgtgggttcatcaggtttcttgtcatactgccccgctctgctacccccatccctggattgtttggaagcaaatcctagaccttactgtcacttcacatataattattaaaggaagaacatgaacattgtaattgattgcaaactcaccatgaacctggtggaaagaagagatcacaataggccgagatcacggggaagctcttggaagcaagttatgaaggaggaatacggattttggcagagaaagtctgtaagtaggaagctgtaaatcatgtgtccaacatgtggtgagcagattgttttatctggagtggggactgggtggcggaggggggtgagcagaggaaaatctaggcctgggacagagaggcagcctttgggcaatgggacagactggagactcttttagttttatgtaatgcaagggctaaggaaaaaactttgcctttgtcccctgaaggtttgctgaaaaatcaactgacaaaaagcagattaatagaagagaaggctggccaggcgcggtggcccacgcctgtaatcccagcactttgggaagttgaggcaggaggatcgcccaaggtcaggagttcgagatcagcctggccaacatggtgaaaccctgtctctactaaaaatacaaaaattagccgagcgtggtggcatgtgcctgtaatcccagctactcgggaggctgaggcaggagaatctcttgaacccaggaggcggaggttgcagtgagccaagatcgcaccactgcactccagcctgggcgacagagcgagactcggtctcaaaaaaaaagaaggcaaggtatataagtgtattagtgtgcgctgtgggaggagggaggaacacagagtgattacccatatcctagtggggtacagatgtttatatgtcttgtttttttttaggggaaaaggagatggggaagtgtggatgattttagggaggtaacagatgatttttaggggaattcaatgagcttgaagaacatacaatggcttgggacaaagtctgtttgggcagacaatggtttgtgacaaaaatctttccaggtgtgttgaccgacttcagtgttttgccctgtgatatgggttcagttaatgaaaactcagggagggaatggatcagaggtgattgttttcttttttgccaggtctagacgttaggcagataagggaactccagagaataacttttattctgtgttttgggaggacagaaatgatgggaaagggaggaagatcagagatacattgaggcttcttcctcaattcagcatgtcaaagcgccatattttgggataccgctttctgagccccaacagtaactaggtattattttgaagggttgcattcacacttgtgacatggagtaaaggccagtggtaatatttctgtagagcgctttagttctgtctctcaatgtactttccttgttaactaatttctcctttagtagcaaaaggaattgtgacaggtgcatttaaagaaactgttacctgcaccaactaccaggcattcgttagttggggagaaatgagaactcatgttttccatactcagccctaccccaagatgacctggcaactgtacattttatcccactgggtttaatccttattatgaataacagagcgaaactttgttattcatgggagtggatttctcctgctgagagaattagcggcaatctcattcaggaagctgccttctgatgcaatgaggtcttttgaactgtgcataaatagaggccattctttaggcatttggagcatagggcttaaattgctccagaagttccaatcagactctaggtatctttggctgttttttttgtattttttttggttttttttgagacagaatctcactctgtcgcccaggctggagtgcagtggcacaatctcggctcactgcaacctctgcctcccgggttcaggcaattctcctgcctcagcctcccaagtagctgggattacaggcgtgcgccaccatgcccagctaatttttgtatttttggtacagacggggtttcaccatgttggccaggatggtctcgatctcttgacttcatgatccacccgcctcggcctcccaaagtgctaggattacaggcgtgagccaccacacccagccttctttgactgattcttctctgtgtgcgcatgtcctgaggtcacaagtggtagtgtgctccgtattggtttcttgacctgcctcttcaggactttctaaaattaaggtacaaccgattcttttgctgcagtcctttctgcctaaagaaggaagaaattcttctgttttcagaaaaaaaaaaaggaaaataaaagaatatgccagcttcaccaggataacccacagacattgagcattaggagtatggtacaaaaataatttctttcctcattaaggtttttttttttttaatttatgctacgagaaatagaacagagtgagcctattgttgtcttgccatcccagaatctcttaggaggacaaagagagatactttagtgtttgtaaagggagggttgactatttgtgcaggtttcaaaactcctgcaccccaagtccccagcagaataagcctctctgggtccattgaatggtgggtttttgaatggtggatctggggccttgtatggcagatgcacctgacagccataaccgaagcacatcctaagaatgaccctaaggttggccaggcgtggtggctcacgcctgtaatcccagcactttgggaggccgaggtgggtggattacttgaggtcaggactttgagaccagcttgggcaacatggtgaaaccccatctctactaaaaatacaaaaattagccaagtatggtggcgggcacctgtaatcccagctactggggaggctgaggcaggagaatcgcttgaacccaggaggtggaggttgcagtaagccaagattgtgccactgcactccagcctgggccatagagtgagactctgtctcaaaaaaaaaaaaaaaaaaaaaaaaaaagaatgaccctaggatctaagaagaatgtgtgtttggacttccaagctaaggaatcggagagtggccaacctggagattcactccttatctatgacagacatccgaacccctagctcgttccttggaatgcaggccacctaggggatggaggccctttgctttgggttaaatggaggttgctaggtgggagggtgctaagtgaaaaacacaatataaactgcatgcttagtacaaacagcagtggttctcctgtccagcctgctgcccctggaatgccccttatgtaagtcctcaataaaccctgtctccctcactagctccgggtctctctctcttttttaatggagtctcccaggctggagtgcagtggtacaattatagctgactacaggcatgtaccaccacgcccagataattttaaaatttttttgtagaggcaggggtctcaccatcttgcccaggctgttctcaaactcctgggcccaagtgatcctcccacctcagactcccaaagtgctgggatttcaggcctgagccaccacgcccatcctgggtctcttttttggtgcctcggacatggtgccatccctgcttggagtcagcagaggtcttacgcgacagtccttggaatggtggaagcctgttttgttgtctttgatactatgaagggacaaacccctgctttgaaggtgtttatttcctgaaatttttacctgggatcccagctatctctttctttctttctttctctctctgtctctgggatcccagctatctctttctttctttctttctctctctgtctctctctttctttctccttccttccttccttctttctttctttcagatggggtcttgctctgtcgcccaggctggagtgcagtggtgcgatctcagcttactgcaacctccacctcccaggttccagcgattctcctgcttcagcctccggagtagctgggattaaaggcgcacaccaccacaccaggctaatgttggtatttttagtagagacaggggtttctccatgctggtcaggctggtgtcgaacttctgacctcaggtgatccgcccgccttggcctcccaaagtgctgggattacaggcatgagccactgcgcccggctgcatgacttttctataaagccttattttaaatgattttgggggcttaatttaggtgttttcatttgcttttggtcacagtctttatgtgtcactgagtgtgtggatgtgggggttcttctacccagaggaaagtgatttgatcacctggaaccaggtgctctgagaactggggcagcttccctgacttgcaggagagggtgcagagacttcttcgctggcatgtagctgcagcctagaaaaccgcttggtggtcctcgttcatgaacctgccgttgggggtgcttcatgctttatcttggtctctaccttgattaatctcacctccgtttctccgctccactggaccattctctagaacccctctagaaccactggaccattctcttctgtcagagtccagtgcttccagtctttcctgtgggctcttatcttctggtgcaaagttctttctcaccttccacagtcaaaatcaccatacttacctaggccatacttactaggctggagaggcaggtacatcaatctttcttgtttatttgtttgtttgtttgagatggggtcttgctctgtcacccaggctggagtgcagtggcacgatctcctccgcctcccgggttcaagtggttctcctgcctcagcctccccagtagctgggataacagttgcatgcaaccatgcctggctaatttttgtatttttaatagagacggggttttgccatgttggccgaactgctctcgaactcctgacctcaggcaatcctcccgcctcggcctcccaaaatgctgggattataggcatgagccagcatgctcagccaggtacattgatcttctaagtatttattgttctgctccttattcagtgctaacatttttattttcttattcttcttccctgtcacttgaagatcgtcacccaagcaataaatccatttggttgtacttatttaattttctctgactttctaaggagtgacacagcaaagtgccttatcttgcatttctttccttttccgtgttctagttggaaaggctcagagtttgggagaagttaaacgtgactcagagaattgcttttgatggtggtgccgatacacacatcttttgaagcttagattgggtattgtcaatttaatttggagtctatcagcctgtagtgttctaatcacctattttgaagccttgctgacgacccgagactccttgttaaactgccactggaataagcataacacttttcattaaaggaaaaagaaaaagttacttaaagtaataggcacacccttttattttcttgacagatagcaaagaaaaaaatcttctgtctttaccttgacaagacatgcaccattgctgggaggttttgcttgtatgagaacttcaacgttagaatctagacatctcggagaattgaaactcaacaagtttctctgttttggggtggagaaaaaggacaaaaagttgtcatatacagctagctgtccaaacagtcaaatacgaaagctaatttatcttttaaaaggttaattctttgatgcctctatcacagttagtgttaaaatgaaagcattggaaacaaactctttttctgttagctcagattttaaaaaaattctttttgcagagatgggggtctcactatgttgctcaggctggtcttgaactcttggcctcaagcgatccttctgccttggcctcccaaaatgttggaattacaggggtgagccactgagccagattttgaatattttaattacttaactgcttgtctgtctggcaatgagataagcgcagtagccagtgattaccaacagttaaacagaagaacaagtcacataaacaacacttatacttcctgtaaacccaattaaaaccacatttcaggtttgctcttatgatttagaagtaaatttagaatcagtttcatgaatcttgcagtatttttcaaattaatgtctttaggcatttggacaatgggctgtgtgaatgcaaactgcgttttcttcaattgctatcaattagagacagttaagaactcaactgatgaagaaatagccacctgaaagtgagcccacaggcaagtcacaggcccctcttcctcctgaaggtgcacgggagacttcgttaaaaaaaaaaaagctgtagtaaaatacgtataagataaaaatttaccattttaagtttcttttttttgaagacgaagccttgctctgtcacccaggctggagtgcagtggtgtgatcacaattcactgcagcctcaccctctccggctcaagcgatcctcccacctcagcctctcgagtagctgggactacaggcgcacaccaccgtgcccactaatttgttgtagttttagtagagacgagattttcgctgtgttgcccaggctggtctcaaattcctgggctcaagtgatccacccgcatcagactcccagagtgctgggaaggtgtgagccaccatgctcggcccattttaagcattgtaaattgtacaatttagtggcattaagtattttcacaatgctgggcaaccatcatcactgttcacttccagaactttttcatcattccaaatagaaattccacccattaaacactaactccccaatgtccccttcccccaccctctggtaacctttatcctatgttctgcctctatgaattggcctattctaggtacctcataaaagtagaatcaatattatgtgttcttctgtatctggcgtctttttcttagcatgttttcaaggttcagctgtagcccatatcagaatctaatttcttttcctttttttgagacagagtttcactcttgtcactcaggctggagtgcagtggcacgatcttggctcactgcaacttccgcctcctgggttcaagcaattctcctgcctcagcctcctgagtagctgggactacacgcgcgcgccatcacacccagctaatatttgtatttttagtagagacggggttttgccatgttgaccaggctggtctcgatctcctgacctcaggtgatccacccaccttggcctcccagactgctaagattacaggtgtgagccaccgtgcctggctaaaaattcttttttgcacatgataaactcacctatcttaagtgtaaaatgaataagtttcagtaaaacaacaaaagctcttaagttttagtaaatccatacatctgtgcagccatcaccgcagtccagttttagaactttccattcccccctaaacatcctccttgcctgtttgtggtcagttcttgctcttaccctgatccccggcaactagtgatgtgatttacgtctctatagttttgtcttttctagtaatttcgtataaaaattatacaacatgtagtcctttgagactgaccttttttttttttgttttgtttttttttgagacagagtctcgctctgtcgcccaggctggagtgcagtggcgcgatctcggctcactgcaatctccgcctcccgggttcatgccattctcctgcctcagcctccagggtagcgggcactacaggtgcccacatcacgcctggctaatttttgtatttttagtagagatggagtttcaccatgctagccaggatggtctcaatctcctgacctcgtgatccgcacacctcggcctcccaaagtgctgggattacaggcctgagccaccacgcctggccgagactggcttcttttactcaacataaagtttttgagttcattcgtgttgttgaatgcatcagtggttgggttttttttttgttgttgttttttgagatagggtctcactgttatcacccaggctagagtgcaatcacagttcactgcagcctccacctcctgggctcaagtgatcctcccaacgtcatcctcctgagtagctgggactacaggcacatgccaccacacctggctaatttttgtatttttgttttgtatagacgggggtctcactatgtttcccaggctagtctcgaactcctgagctcaagcagtctgcctgcctcagcctcccaaagtgctgggactacaggcgggagccatcatgcctggccaatagctggttcttgttttactgctaatagcattccattatagggatgtaccacattttgtttattcatcaccagttgatagagatttgtttctaatttggggctactgtgaatattgctgctgtgatcatttgtatacaattcttggatggacatgtgctttcgttcctcttgggaagatactttaaggagtggaattgctggggtttttttttttttttgagatggagtctcactctgtcgccaggctggagtcactgcaacctcctcctcctgggttcaagtgattcacctgcctcagcctcccaagtagctgggactacaggcgtgcgccaccacgcccagctaatttttgtatttttagtagagacagggtttcaccatgttggccaggatggtcacgaactcctcatgatccacccacctcggcctcccaaagtgttgtgattacaggcgtgagccactgggcctggccactgggtcttatattaaacttatgtttaacttataaagaaattgccaggctgttttccaaagtagttcttgcatttttttactctcactagcaacatatgagcgttttgggtttgccacatccttgtcagtacttggtattatccgtcttttgtttgtagcgattctaatgagtgtgtggtggtatctcactgtggttttactttgcatttcctgtactcttttaaaactgttttccattatagaacatgttgtgttgtgctgttatatatataaagcttctgctcacctgtgagctactctgtctagctgattgatccagtattgtgtccgggggcagggtacatggaaaatgcttagggtttgttgagtgaatgagcaaactgatactttgtaggagtggccaattttcaaatattttaggtaacagaaaacagtggtgaatcaactcaaaagatgaggtaccagtcaaatctcttcccttttgtcagtttctaagtagtattaaacttgagtgaactaagttttacttttttttcctttgctttgcttaccccttggtgagaggtaatggagaaaatatagacagagcaggaggaggaaagaaactcaatctcgaaatgactaagagcttgtggagcagcttgggagagaaccagctgggttattggctactctgtagttccaggtgtggggaattattctcatcaataccgtgaccgcctgccactcccctctgccctctttctttgtgttaattagagcaggggtctgcaaacattttctgtaaagagagtaaacaaatatgtcaggctttgtgggccaagagaaaacatcagcgacgttgtggaggtgcttacataacgacagacaaaacaaatttccatgaatttttatcgatgaaactccaaacatagtaatggggtacgattttctgtaacacaagtctgctaatgagaagaattgaattatttgagggaggaaaacattttgcttaattggaagttcagagttaatgtttcctatcatcatggtagaaatgtggcctcattcttctacaaagcttctctgatatgcagtggtcttccctcctgagaattcaccagaatgtactggcttgatttgcccttgatttgttggggaacttttcacatgggggaagcacattaagagtacaggctcgggctgggcgtggtggctcacgtcggtaatcgccagcattttgggaggccaaggcgggcagatcgcctgaggtcaggagttggagaccagcctggccaacatggtgaaaccccgtctctactaaaaatacaaaaattacctgggcctggtggcgggcacctgtaatcccagctacttgggaggctgaggcaggagaatcgcttgaacacgggaggcagaggttgcagtgagccaagattgtgccactgcactatagcctgggacacagagcaagactccgttctcaaaaaaaaaaaaacaaaacccaaaagaggacaggctctagggtaagactctggggtctgaattccagctcaacaacttattaactatgtgatctttcactacttacataacccatctaaaagctttggtttcctgatctataaaatgaataatagtacctatttcacagagttgctgtatagattaaacacaaagatttagaatgacatattatactttttattcttcttttgattttttttcaaccatttaaaaatgtaaaaccattcttaagtcatgggcagtatgaaaacgggtggcagggcctgcaggatatagtttgtggaccctgcattggagtatgaacttgaattattgccgtttactttagaaacgatgattgcttttttcctaattgcaaagcaccatatgttcactgcagaaaacttggaaaacacaaaaaagcacaataaaacaaaagccattcagaatctccaccatccagagacgtttcatgagtagtatgttgccccatagccttccagacaattgtgtacataatacacatatttcattattttttattttccttttttttttttttttgagtcagggtctcactgtgtcacccaggctggagtgcactggtgcaatcacagctcactgcagcctccacctccagggctcaagcaatcctcccacttcagccccctgagtagctgggactacagctgcatgccaccaggcctggctaatttttattattttttgtagagatggggtcttgctatgttgcccaggctggtcttgaactcctgagctcaagtgatcctcctgctttggctttccaaagtgctgggttaacaggtgtgagcctctgtacccagcctacacatatttcaaagtaaaacccaagcccatactatgcatactgctttgtatctttttcacctattaatatgcaatgcttgtcattaatattcttctataacctgaattttaatggccacatactattctgttatactgtgttaaaatttactaaagcaatttccaacaacattaatgctgttttgaatttttcaccattagactgaactcagcaataacctggtacatacatgcttatacacatctcttgattcattccttgggataaattacaaaatttaatcactgggtgacagggtatctacatttttatttatttatttattttgagacagactctcgctctggagtgcagtgatgcaatcccggctcactgcaacttccgactcctgggttcaagcgattctcctgcctcagcgccagagtagctgaggttacaggtgcgcaccaccatgcccagctagttttttttgtttttttttgttttttttgtatttttagtagagatggggtttcaccatgttggccagactggtctcgaactgctgacctcaagtgatccacctgcctcggccttccaaaatgctgggattacagacgtgagccaccgctcccagctgggtatctacatttttaaagctttggtgtatcttgcaaagttgtctcctaggaaagttgtatagttagtcattcccagatgatgtatggagcactgttgtttcaatgcccctcttatatttttacttggttactgggtttgtgaacttaaaaaattaaaacattcttattttaaaaacaattcaaatatataaaacatgtacagataataatgaaacgtacacttatgtacccagcagaaagattaaatcggtgttaacattttgctgtatttgcatttgttacttttaaaaaacacattccagattcaaaaacaagtctattattatcatcccattttacaagtgaggaaactggctcaaaaactttaagtaacttgtctaattcttaagaaccagtaagtgggctgtaaagaaccagttgatcctaatgatgcttttaccttaggcttttactgatattaatatagcccttccagtcttcttcccctttttggtcagtttctgtctggtacatgttttctaatgtctctacttttaagttttgtatgttgttgtattttagatgggcctcttgtaaatagcttatagctaaattaagaaaaaaatctcgagtctgggtttttaaaccagctattaataacctgttttttaaccagctatttcagtctgtttgcatttatagcaattgttgatgttttttgaattatttgtcttatttcatgctttctatttcccatactttttctgttttttctccatttcctgtctcctactgaattgagttttaccaggttttctctttttctctctactagctttgttatcctaaaaatattcaatgtgtatacttaaatagcagtcagaaattaccctatcacctcccccacccagtttttttcttatttagtgttttaatttctccttttttggtattttattgtattttgtattttattcactgttatttttgttgttttgtgcagcccaaactgtatatatttttatttactagggtctttactcgtctttctaagtactcttttatgtacacattttattttctgaaaatatatactttagtgcattttagtaagagcctgtgaatgtacttagttcttgtttaaaaacagcttctttgtcctcatctttcaatgactctcttttagcttagtatagaatctcccctcaaccctctgaagatagtatttctttgtcttctcaacttttcttttcctcatttgttttctcaacttctcaaccctcttttttcttatttatttggaaatggggtctcactatgttggccaggctggagtgcagtggccactactgatcagcacaggagttttgacttgggctatcacttcacccctccttaggcagcctggtggtcccctgatcctgggagatcaccatattgatgccaaacctagtgtggatacctgtttggaatagtgcactacagcccagacctcctgagctgaaacgatcctccctcctcagcctctgaagttgctgggactatagtctcgtgccgccaaaccctgctcagctctcatttgttactgagaagtcttctgtctgattgctcttcctttgtaggtaatctgccatatctctctggctgttttttgttttttgttttttgttttttgttttttgagacggagtctcgctcattcggcccatgctggagtgcagtggtgcaatcttggctcactgcaagctccgcctcccaggttcaagccattcttctgcctcagcctcccgtgtagctgggactacaggcgcctgccaccaggcccagctaattttttttgtatttttagtagagacggggtttcaccgtgttagccaggatggtcttgatctcctgacctcatgatccgcccgcctgggcctcctaaagtgctgcgattacaggcaggagccaccacgctggctatctggctgttctttaggcttcctctttgtctttgaaattctggagcctcagtcctgtgtgcatggattcatttttatttattctgcttagaacttggtattctttacacggagaattcatgacttttacaattctggtaagtccttaactattatcttttaaaatgttgcttctccttcactggggcagccataaaatcatgctgctcggttgtcttgctggaggaagcatagttgactgagccccagaggccatgtctcagattcactcacgcttctcctgggctgctcccagctgatggcagaatatgacaggggtaccagtgctggcccactgctgcaggaggtaggatcctttcatggatgacattggctcctggactccccatcagtgtgaccaaactttcttacatctgcgtctcactctgagtctcttcctacccagtactcctttcttctctctccatcatacctacaccatggtctgaaggctctccctgcctcctcctgcttcctcctctttttccttcacaggtgtttttcccaacatctcgtctcagcatctgcttcttggaggacccaaactaacaccgtatctctgttttcatcatctgaatcttgtattagatgcatatggaccttctcattgtgctctctatgcccttagttattcttttatgcctcattgacctctctaatgctctttgggtaatttcctcagatctgtcttccattttactgaattctctcttcatttctgtctaatctactatttaatctatctattgcattttaaaattataatatttatttctaaaagtaccatttggcttgttttcacatctgactcttacttttttcccagtatattcttctcagggttttagtttctcattttttgtctttaacagtctaaagcacacttacattgtactccctctttcaaattgtagttttatcattccaagttccctggagctctaataatcttgtttgttgtatttgctgttttctgcttatggtgtattctaatttttaattttcctctaaactaacctttagtgggggttattttttttccgtgggaatcttacatggtctgatagtgaggctccttcagaacaattagcattgctcagaacaatttgcattgcttcttctagagatctcaggagtgtcactgccttggggccaatatttctgttaatttcttagtttagaacggcctggatcaccccgcttaaggctcaggtttgggatatccatttttcaggggagaggtttttttcacttagaacccaagaacacaaaattgttctcctagacccctgtaccaggggatgatttttccccctagtctttcttttcactgggaagtatttctttgaagatcctaactctctttggggcttttttttttctttttctttttttttttttttttttttgagactgagttttgctcttgtcgcccaggctggagtgcaatggcttgatcttggctcactgcatcctccgcctgccaggttcaagcgattctcctgcctcagcctcccgagtagctgggattacaggtgtgggccaccacatccagctaattttgtatttttagtagagaaggggtttcaccatgttggccaggctggtcttgaactcctgacctcaggtgatccgccccgcctaggcctcccaaagtgttgggattacaggcgtgagccaccgtgcccagcctctttggggttttagttccaactctctgcttcatggtgactcatggtttcacctcctttgtccacttgggttttaaattgtaagtctggaagttactagaacaatcccagaattagctcacacactttcactctgtttttccctttcttcctggggttatattttacccagcattcctaggtgtttgtggtgggagattccgcccctacgttatcttaatttgttgccatatttctgaaccaggaatcccatttaccacattgagttctggacatcaaggttctccgggcatcactttctatgctgtgtcatcagtgaagcccataaacttacccgttatcagaaaagcgaagatttcgagatcttgttgagacggtaggtatatagtatgtcctgaggggtttagaaaaaatagctacctttatttccaacccatggtaacttcattggtaaatccagacagacctgtaagatttttacaaatggaaccagcagcttagaaaacaaaaaataataattactttatcatcacaagtattccttttactgcctcagcccagtaacagagctcttctatctctctcgtttctttctcccagctttcccaccatccttctcaatttgtcctttgtcaacagggcagaaaaggggttgaagtgatgtatgggtgtaatccactgtgcactgctgaaaagataaacttaaatgaagtgatttataacctgtggcaggtattctgcacccagaattgtttgtcaaagtgagtgctcattgattttccatgccttccgtgtcagcccctggattgccattgttccttagaggtggctaagcagtttaaggcatcagggtgttctcccagcgcgggcactcactccgctgcagggtttagccttcaactgtgttccagggctcggaactccctagttgaccccttgctgcaggaggcaggattctttcgtggatggcattagctcccagactccccatcagtgtgaccaaaattttcttgttttttttttttgaaacagagtctcactctgtcagccaggctggagagcagtggcccgatctcaggtcactgcaacctctgtctctcgggctcaagcaattctcctgcctcagcctcccgagtagctgggatgtgccaccacgcctggctaatttttgtatttttagtagagacagggtttcaccatgttggccaggctggtgtcaaactcctgacctcaggtgatccactcacctcggcctcccaaagtgttgggattacaggcatgagccaccgtgcccggccctttcttttttctttttctttctttctttttttttttttttttttttgagacggagcctggctctgtcacccaggctggaatgcagcggcgcgacggtggctcactgcaacctccacctctcagattcaagtgattctcctgcctcagcctcagtagctgggattataggcgcgcgccaccatgcctggctaatttttatatttttagtagagatgaggtttcaccatgttggccaggctggtcttgaactcctgacctcaggtgatccacctgcctcagctcccagagtgctgggattgtacaggcgtgagccactgcgcccggccagtgtgaccaaaactttcttacagctgtgttgcactctgagtctcttcctacccggtactcctttcttttctctccatcatacctaggccatggtctgaaggttctccctgcctcctcctgcttcttctctgctaccatccacactcactgtgtccatgaaaagaccagattccactggtacttcagatttctcaaatgagaagtaaaacatattctataagttttgaaaatgcttctataaaatgcttctggaatcttcctactggaagtcaaatagataataggtccccatagaatagcacgggacaatagtacagcttcgggggcggtgcccagggaaatctgggctgagttagatgaaggatactaagcatcctatgggaactcatgcagcagggagtctccttcgcttaaggggaccacatacatatcacacaggatgtgtctttcttgtttttctccaaacccatcccgttgtgttggagggtgatgaagtttttccagcaaccacagtgcagtctggtgaatcagaatcagtgtcattgagcctcagcaacacccagatatccaagagattgtcttaaagaatcttagaactgtaggctgggtgtggtggctcacacctgtaattccaaaactttgggaggccaagaggatcgcttgagagcaggagttcaagaggatggcttgagggcagaagtctgaggctgcagtgagctgtgactgcaccattgcactccagcctgggtgactgagggagaccctgtctctaaacaaaaacaaaaacaaaaaacttagatttttggaccttagatcatttaatctagagttctaactcgataggcaaggaatctgaagcctggactatttgatgacttgctcagggtcacagaactatggagctccacagccagcattacgacctgggtttctggacttcctgctcatccctgtttctggaagggcttctgctccaggtctctctgggtaatgtcccatttgctttcacaacatgcctcttgaatctaaagaaagcagtgctgttggtggttgtcttagttgcagtttatttgcttggtcctttgaacaggaagagagttatgtttattatgggttgggaggaatgaacttgcctacacctttttttttttcttttcttttctttttctctttctttctttcttttttttttttttttttttttctgagacagggtcttgctctgtcgtccaggctggagtgcggtggtgggatctcagctcactacaacctctgcctcctgggttcaagcaattctcctgcttcagcctcctgagtagccaggattataggcgcccaccaccatgtccagctaattgttgtattttcattagaaatggggtttcactatgttggccaggctggtttcaaactcctgacctcaggtgatccatccacctcagcctcccaaagtgctaggaatacaggcgtgttcctacaccgtgcctggctgcactttttcttttttctgttgtgtgcctaagacatggttatctagacaaaaataccacttagtaggcactttaccaatacatatcatgctagaaaacagattgctttcatgcaaatgaggtggagctaggaaagttatttatgtaatgattatttcacaattggaatttttttttttttttttttttgagatggagtttcactcttgttgcccaggctggagtgcaatggcgtgatatcggctcaccgcaacctccgcctcctgggttcaagcgattctcctgcctcagcctcccaagtagctgggattacaggcatgggccgctacgcccggctaattttgtatttttagtagaggcggggtttctgcatgttggttaggttggtctcgaactcccgacgtcagttgatccacccacttcagcctcccaaagtgctaggattacaggcgtgagccgccgcacccggcaacaattggaaattttttaaaaacaaagactatttagcttgagctcaactaaagactttggtttgcatattatagacaaatacataaattgtgtttatatagactgtgtacatatataattatatactgatgagatatagcatttgtatttttcaaaccacaaacatcctgtagtaattcagacttatacttctgcatagcaagtaacaatttataatagctaaacaggaatgaatatggatggtgtttctttgtgcctctgattggtgggtaggggggattgaaagcttgattttgatcagtttttttttaaacttatgtgcattattgattaatcacttaattgaattggtgggatatattttcatacatgcagttgtggcaatattgattgagctttctctgagcccaaactaccaattcttacaagtgaaacaggatgtcatctccgtgttgtaatcattttatacttcacatagtacattggaagtctgaggtagcaaattcggcttccggaagtccttgacttggggtcaaagagcatcgctgatatcaggagaagctgcctgaatgtgaattcggtagtaaaaatggaaagatattttatgtgtttggctaggcgcagtgcctcacacctgtaatcccagcaccttgggaggctgaggtgggcagatagcttgagctcaggagtttgagactggcgctgtgggcaacatggcaaaaacctatctctacaaaaaaatacaaaaattagctgggcatggtggtgcacacctgtggttccggcggctacttgggaggctgaggtgggaggatcgtttaagcccgaaaggcagagcttgcagcaccactgcactccagtgtgagtgacagagtgagaccccatttcaaaaaagaaaaaaaaaagagccaggtgtggtggctcatgcctgtaaccccagcactttgggaggccaaggtgggcagatcacttgaggtcaagagttcgagaccagtctggccaacacagtgaaacctcatctgtactaaaaatacaaaattggccaggtacagtggctcgtgcctgtaatcccagctattctggaggctgaggcaggagaatcgcttgaacccgggaggcagaggttgcagtgagcagagatcacgccactgcactccagcctgggcgacagaacgagactccatctcaattaaaaaaaaaaaaatgatattttctgtgttcatctaagtagagaaataagtatagactgccttatgttcatttgcttcccagtgttccttggtggctggattattcatctaagtgagatgtaagatcttttgagcatctaacataatagttattcataaagacatttaggctgatggctttctcagaacgtcctgctgttcatgatggacttcatctatatttcaatgaatttctaaatggaggaaacagaacatttttcctttgattaattcattggttttcagtcctcaaggacccataggctggcgaactctaagaggaagtcacaaaaggaagaatggtaaattggaattggaactgtggaactcaccccgtaaaaatctttcaacactgtcctgagttcaacatctgaaatacagtggaccaggagaagattgatggaagctaatttaaaaagctaatttaaaattgcaccaaaaaaagcacagcgttatgaatttaataaagttcgtagggtgttttggaccacgattttacaactctctcactttttttttttttgagacagagtctcactctgtcacccaggctggagtgcagtggtgcaatctcctctcaccgcaatgtctgcctctcgggtccaagcaattctcctgtctcagcctcctgagtagctgggactacaggcatgcaccaccaggcctgattgatttttgaattttattagagacggggtttcactatgttggccaggcaggtctcaaactcctgacctcaggtgatccacccgccttggtctcccaaagtgctgggattacaggcgtgagccaccacacccggccacaactctcacttttaattgactgtgccccagaatcaagcactttggctagcaaatgatggctagttagatcacagaggtgtgtgttgcattctgtgtctgttcactgtgaaatcgggattttaagagtgtatgttgttgaacatacacctgtctttgagtgatcggtccccagaggccacctctaaggtgaagatttggggaggtaattgtgggaagccccaggaggagcagaggaaaatgagaaaggggacgaagggaatgtaatagaatgtgtgttgggagagggtttccttatgagccagtgcagaggaaagtcttgaaatgcactaaggaaatacagtctgtgccgtgatggtagcaccgatgtggaatcccataagcagctgcttgaaaaagacttggtggcagacataactctttttgccttttaagtgctccgggagatttcacatgccaatgttgaattgtccccaacttgggttcagggtgcccaggaactagcaaaatcagcttttttgtggtaggatcttcataggatccaggagctgtcacccacgaatgacagagcccctgcactggatagcctttctccaatctgtataaggtggaatagggaaatgaggctcctctctgatgttcggggctttagctgggctgggttctgagtcctctgtgcctagttccccttgggaagcactggagaccttgaactggaaattctcttcctgggatcaaccaaatactcccaaaacttcgtggaagcttagctccttgtgccttttgtcaggtttccctagaagtcaagggattctcatggagatgatgtatgggatgggggctagagggctgggaggatggtagggcgggggtaaatctaaacttcaggtgtcttgggagtccatgacttgcatcacagagctggtttcccccccgtcaggcaaggtcggcctttatttatttatttatttatttattttagagacagagtctccctctgtcacccaggctagagtgcagtggtgccatcatagttcactgcagccttgaacttctgggctccagcgatccccctaccttagcctcctgagtagctgggactacaggcacacgcccaaatgcataactaatttttaaagtttctgtagagatggtggggtgggggggtgggggggggcgcgtctcacgatgttgtccagtctggtctcaaactcctggcctcaattgatcctactgtcttgacctcccaaagcactggaatttacaggtgtgagccactgggctggccaaagtcagccttttgtacccctctcaatgtcagccattgattggttgtgggcctcccacaggtggagaggttcccatttgttcaaacgcaatttacaaacaagggggcagatgggacccattagtagctgaaactcacagcaaccagtgcctagtaaaggattcatgcagggccctcccacacgacccaaaacagcaaagagaaagggccaggtgttggcctttttctaactcatcccttttaacacagtaagttcagcagtcctctaagagtcccacttcaaagtacccctcttgccttccgaattcagtgttgttagcccttttgcttgaaaaacccccactcttggacacagaggaaataggagtcagatgtctgcaccttctgcacctgtggtttgaacaggaccctctgggagtcgcaggaggagtgcttggccctggtgcttggcaggaggttgggctgggagatgatgattgccttgatcctctctttcaactacttcattccaactgttggaatacctcagtagtgagtattaattttcttcccccccaaatccagcaagcaatctagctccttaagagaagactatgttcctgctattaacagggctttgactgtttttgcaaaataataactgggcattcttgtgttaaggaccatttgtttccttcacctgcttttcttcccaatttagctgaaaagggacctgagccagttaggagatttttttttttttttttttttttgagatgaatcttgctctgtcacccaggctggagtgcagtgacatgatctcggctcactctcaggttcaagtgattctcctgcctcagcctcccaagtagctgggattacaggtgtgcaccaccattcttggctattttttttgtgtgtgtgtttttagtagagatggggtttcaccatgttggccaggctggtctcgaactcctgacctcaggtgatccacccgcctcagcctcccaatgtgttgggattacaggcatgagccactgtgccccgctggagactttttttttctgaactaaaatatcttttcagatacaaggttcagggagggtggtgtggaccagtgagagaagtttcatttgcacctttttcatttttattctgatccagagtgactggagtattaatggatgttgtcataggcttttgaagtggccttgcttggtgattgagtggctctcgcaaaattctgaattttggaaccaggtattgctttctagctatactaacatgtccctttaggagtctaatgagatctgctttgcctctgccccaaacagatttgctttacaagttactgtcactcagggcaagctccaagctctgtatctaaaaagcaaagccacctgccagccacaaccaggtgcatgttgcctttgggccttgtgtcaaaatatcttcatcatctaagaataaaacccccaaagaggtcagcctgatcttgtagaaagccgtccctgggaaaatgattaaatgtcagtaaacaagagcatttcagaaactgacatggtccctaatgtttgtgtttagagactcctaatgtgtcagaattgagttggagacttacgatgtaattgcatgtcttgtatttcatgccagcctctcggcttggtgctggggcagagtgggaagcagaccacagagcagagagggcctctgcccttttattgtcctgtgagagagatggatattcacaaataatcctgtccctaattaattgcagctgagataaccattataaaagaaactagagagtgtgacaaggggtgactatctcttggtcttggttgtcaggcaatgctatggaagggttatttagagtcgtagaagtgtctagtacaaccaccagctgatgaagatagtacaggaggaagcaggcatgtttgagacatggtgagtttcaggctcaattaaggagctggagatagctaccagctgttagcaacactgggggcgtgcaggagcagcatcagggacagatttgggagtcccttggggaagccgtggtgaagccacaggaatgaacaggtggctttctttcctttttttttttttttttttgagatggagtctcactctgccgcccaggctggagtgcagtggcatgatctcggctcactgcaagctctgcctcccaggttctggccattctcctgcctcagcctcccgagtagctgggactactggtgcccaccaccacgcccagctaaatttttttgtagttttagtagagacggggtttcaccgtgttagccaggagggtctcgatctcctgacctcgtgatccgcccacctcagcctcccaaagtgctgggattacaggtgtgaaccaccgtgcctggccgcttttttttttgagacggagtcttgttctgttgcccaggctggagtgcagtggcactatctcggctcactgcaacctctgcctcccaggttcaagcgattctcctgcctccacctcccaggttcaagcgattctcctgcctcagcctcccaagtagctgggatcacaggcacccaccaccacgcctggctaatttttgtatttttagtagagacgaggtttcgccatgttggccaggctggtctcaaactcctgacctcaggtgattcgcctgcctcggcctcccaaagtgttgcaattacaggagtcagccactgcgcctggcccaggtgactttcttgagagagtatggagagggatctgggagaatgtctggatgaaaccttctttaagggcctgtcacctacatgcaataaagaccatactaattgtaataagaccattgtttactttttgttccccaactggtgcaattttcccagtccctgtagtagccccaggatggctcagaaactgtctgggttcctgctgtagacactgtgagaacttcctttccaagtgtagccaagcacccgccccactgctgcagcctgtgccatcctcccccttctctgcacacattgcatatccctgtggtctccgttttgagctcagagtgtgggcctccaaccctcagcaccgtatcactccgtagcttattagaaatgcagaatctgcagcccccgcccagcttgctgaatcagcctctgtgttttaacaagatccccgggatctgtctgcctgttgacaagggagaagcctggtctcggttacctcctcctcagcgtcctgagcctggctggatcgccagcacactcagaccagcggccccaggctcttgtgacagcagccgtcagacccgtgggagttcaggtgcgggtcatcagggccctgctggctactccacctctctgggtccctcagctcagagattccacttgagtgtagagagaattgttcccctctgctctggtgccctctttgcactaatgtttagggacctagaaagggcatcaggaaataagacagaacaaaagccaccaagaggaagaaggaaattcaagtgccatagctatagagaggctcaggaggataaaaacaaagcaatagcaggggctgagagattttttaaaaatcagctttactgtgatatataatatatatatgtgtgtgtatatgtatatatataatttttttttgagacagaatcttgttttgtcatccaggctggagtgcagttgtgcaatctcagctcactgtaacctccgcctcctgggttcaagcgattctcctgcctcagcctcccaagtagccaggattataggcacacaccaccacacttggctaatttatgtatttttagtagagatggggtttcaccatgtcggccaggctgttttcaagctcctgacctcgagtgatctgcccactttggcctcccaaaatgctgggattacaggcatgagccaccacacctggccatattgtgatatagctaacatagaatagaactcactttaagtgtacagcttgatgagttttaacatatatatacacacactgtagtcatgtaaccactgccccatcaagatacagaacatttcatcacccctagaacttcccttgtgacttttagctgtcaattacttctctctaccccccacattccccactcctgttcctaacaagcactgatctgcttttgcactaaagtcttgcctttcttaaagtttcctatagatgcagtcatacagatgtagtctcttgtgtctcacttcttttgctcaacacaatgtttttgaaattcatccatattccccgtccgggagggaggtggggggggtcagcccccctgcccggccagccgccccgtccgggaggtgaggggcacctctgcccggccgcccctactgggaagtgaggagcccctctgcccggccaccaccccgtctgggaggtgtacccaacagctcattgagaacaggccaggatgacaatggcggctttgtggaatagaaaggcgggaaaggtggggaaaagattgagaaatcggatggttgccgtgtctgtgtagaaagaagtagacatgggagacttttcattttgttctgcactaagaaaaattcctctgccttgggatcctgttgatctgtgaccttacccccaaccctgtgctctctgaaacatgtgctgtgtccactcagggttaaatggattaagggcggtgcaagatgtgctttgttaaacagatgcttgaaggcagcatgctcgttaagagtcatcaccaatccctaatctcaagtaatcagggacacaaacactgcggaaggccgcagggtcctctgcctaggaaaaccagagacctttgttcacttgtttatctgctgaccttccctccactattgtcccatgaccctgccaaatccccctctgtgagaaacacccaagaattatcaataaaaaaataaattaaaaaaaaaatgtaaaaaaaaaaaatgtaaaaaaaaaaaaaaaagaaattcatccatattattggatgtatcaatagtttgttcctttttattgcatagtagcattcccctgaatggatataccacagtctgtttattcatttaccagttgatggacatttgggttacttccagttttggatgattttgagtaaagttgcaatgaacattcacatacaagtccttgtgtggacctacgtcttcatttgagagatttttttccttttaaactttttattttattaggttggctgaatagaaatagagcaactgaaatccaagggaagggctcaggctatgcttcctgctggtaccagcacaacctctatccctgctgttgctgcaaaactgtgcaaatcgcctcagggtacttgaccatggaggagcataatctannnnnnnnnnnnnnnnnnnncatcatataccccctaaagttaactttagatttacagaagagttgcaaatccagagaaccccccgtagtcttcatccaccttcccccaatgttaatatcgtactaattatgatacatttatcaaaactcaaaaattaacatgggcacagttgtattaactaaactcccgactttcttcagatttcaccagttttttccactaatgtcctttttctgttccaggatttaatcaggatataatgttgcacttaattattatatcataatagtcactttcaatctatgtcaatttctctgtctctccttgtttttttatgactttgacatttatgaagtgggctggtcaagtattttgtaggatgtccctcaatctggatttgtctgatgttttctgatcattagactgcagttggggtttggggaaagaataccccagaggtgaaatggccttctcatcacataatattagggggcacatgatatctacctgattgctcactggtgaagttaaccttgatcacttggttaaggcgttgtctaccagagttacccaccgtaagctgctaatttccctttccatactctgttccaggggtgtccaatcttttggctgccctgggacacattggaagaagaattgtcttgggcaacacataaaatacatcattaacactatgacagctgttgagctaaaaaaaaaaaaaaaaaaaaaaaaaaaaaaaaaggaccgggtgcggtggctcacacctgtaatcccaacactttgggaggccgaggcgggtgggtcacgaggtcaggagatcgagaccatcctggctaacacagtgaaaccccatctctactaaaaatagaaaaaattagccgggcgtggtggtgggcgcctgtagtcccagctactcaggaggctgaggcaggaaaatggtgtgaatccaggaggaggagtttgcagtaagccgagattgcaccactgcactccagcctgggtgacagagggaaactctgtctcaaaagaaaaaaaaaaaaaaaaggtctgtgcataaatatcataatgttttaagaaagtttatgaatttgtgttgggccacattcaaagctgtcctgggccacgggttggacaagcttaccgtctattcattagaagtgagtcactcaggggagggagattaggccctgcctcctacagggaggggtttcaaagaatttgtggacatatgctaaaaccagcaccataattaatgtggtatttttttttttttgacggagtcttgctctgtagcccaggctggagtgcagtggcctgatctcggctcactgcaagctctgcctctcaggttcatgccattctcctgcctcagcctcctgagtagctgggactacaggtgcgcaccaccatgcccaactaatttttttgtatttttagtagagaaggggtttcaccatgttagccaggatggtcgcgatctcctgacctcgtgatccacccgccttggcctcccaaagtgctgggaatacaggtgtgagccaccgtgcccggccaattaatgtatttttattattttaaaagttattcttatttttagagatagagtctcactatgttgcccatgctggtcttgaactcctgggctcaagctgtctacccacctcggcctcctaagtgctgggattataggcgtgagccactttacctggcctgcttgtttttttgagacagagtctcgctctgtcgcccaggctggagttcagtggcacaatctcggctcactgcaagctccacctcctgggttcacgccattctcctgcctcagcctcccgagtagctgggactacaggcgcccgccactacatccggctaatttttttgtatttttttagtagagacggggtttcaccgacctcgtgatctgcacgcctcagcctcccaaagtgctgggattacaggtgtgagccaccgcccccggccctggtgtgctttttaatattttttggagatggggtcttgttatgtttcccaggctggccttgaactcctgagctcaagtgatgctcatgcctcagccttcagagtagcaggcattacaggtgcatgccacctcacctggctaataaatgtttttggagggatgtgttgagcctatgcaggtatcctgtttccccttaaagtttgcccatgaacttaacattcctcagtggaccctgcctgcagctattattactgtaatgttctcctggtgattttctattcccccttgccttctgcctttattacatggaattcttctgtaagggaaatttgtttcttctccaggtatttgtttatctatcctctcatttatttatatcagtgtggactcacaagtacttattttattctctgggtgagagatgtttttaagatgggaaaatggactactttaagttaacctaactgtgagccaggtagcaggaggtgtggggaggaggagcatagatgctgggggaggaatgggcggtggatggagcgaagttcctaggaaggtcagtgagaaggagatccggaggtgggggtcttggcaaaaacaagggacaccctgttcccacaaatgggtaagaggaaagtttgggagggtcgatttccatgtcaggaaggagaacttgaaggagttccaactaattagcttttgtcttctccgtcaagatgttttctgtgacgacaatgggaagttgacttttggaattttaattgtcttggccaaaattcctggcctctagagtaacgtttctcaacctcagccctgccgacatttggagcagataattcattgttgtgggagccgtcttgtgcattgcaggctgtgtcgcagcatccctggcctctaccctctagatgctttagtgccctctcctgtttccccagcagtgaccaccaaaatgtctccaggcagtgtcaaatgtgccctggggagcaaaatcgccccatgctgagaaccacagatctaaaattaacacacacaattctggcaatccgtaggattcttcttctctttatttttatttttttgtctccctctgttgccaaggctggagtgcagtggcatgatccatagctcattgcagccttgacctcccgggctcaaacaatcctcccacctcagcctcctgagaagctaggactgcaggtgcacaccaccatgcccggcggcttttttttttttcttgaagagggggactcactgtgttgctcaggctggtctcaaactcttgggctcaagcagtcctcctacctcagcctcccaaagtgttgggattataggcatgagccactgcatccagcccacgggattcttgaccattactttgaaagactaagatgatggcattcacctattaattttctgcagaaagagctaagctgctctagtgtgaacactcaacgttgacgctatggatgagggagggccctgctttcttgggaatagcggatggtcctttcagcacacagcacagatgaatgaagaggaaatgaagttctggttcgcagagggtctttggttctgaaaagcgttgccgtggttctagccttcctcgcggtggagggtgttttgctttctgcgcggtttctgtgtgggccgtgggaagcaacttgattgttatcacagttggggacacagcagctcttctcataggttaatttctgaaagcccatttgttctaaatccaacgtgacgcctaccgagctgggtacaacattggtttgtttcataaaacagcccggggtgtttgggactcttactcctttacaactctcatttgactgtccaaagatgcttgcactggggcctaattttctgtcaccttccctacgtttttaacaagacactgccatttcaaacatagcgaacacgacagattgaggaacaaggccaaggcagaggctgcgacgacctcgtacagccgctgatgccatctgttggtggctggcagaactgatgccctttgctgcgagggagctttgtttattgcacagaaagttgaaagttggcagcagagaaccttgttaccacctgggaggataggattggcaggattagggaggactggaaggggagggaatgcgtgtttgctttgtaggttgtgcatcagtaagcacaatcaggattcagtgccaggaatccatagttgaaacaattttaggaggatttttcaaggttctggctgggatgccatggggacctccaatccatttctcagtcgactgtcagttaaggcattgggctgtgggaagttaacagagcaacagagcggtctctaacgtaaaaaaaccccagtgtctcccatagagctagcatgcagtccttatttgtggaatttgatattgagggacagtattaactcctcactctaatcaaagaagctatgataatatgatgcaaaacaactattatattctatccccttccaaagtgctttcaaagactaaatttgtcttgataccaatccatttataccaacacatccccacatttctgatgatgaaacagattcctagagactaaatttctttcttttctttttttttttttttgagatggagtctcgctttgtcacccaggctggagtgcagtggcacgatcttgggtcactgcagcctctgtccccccaggttcaagtgattgccctgcctcagcctcctgaggagctgggattacaggcatgcaccaccatgcccggctaatttttgtatttttagtggagacggggtttccccatgttggccaggctggtcttgaactcctgacctcaggtaattcacccgccttggcctcccaaagtgctgggattaaggtgttacccaccacgcccggcctagagactaaatttcttaggtccatatgtctgcttgatagcaagagctggaattagttcagccagtgggttcttaactctggatgcatataagaatcacctgggaaacaaaaaaaaatcttagtggttggcttcactctcagatatacagatttattttttaatttttgtttatttttttgtagagatggggtctcactatgttgcccaggctggtcttgaattcctgggctcaagcaatactcccacctccacctcccaaagttctggcattacaggtgtgagccactgtgcctggccagatatatggattaacggggccgggccagggctgggtcctgggctgtgattctaacctgctgcctggggttgaagcgcttctcctccaggtgtggtccatgaaccagtcgcatcagcatcacctgcgagcttgttagaaatgcagagtctcaggccccaccccagaccctctgaatcagaacctgcattgcaacaaggttctcagatgattcctgtgcatggcgaagtttggaaactctgagtgttgcttttgagatcagacatacagtgctatccattggtgtctgtggaggatgtcttatttgtttatttatgagacaggtctctgtcaccagggctggagtgcaatggcatgatcgcagcacactgcagcctctaccttctgggctcaagggaccctcctgcctcagccccccaagtacctgagactacaggtgtgtgccaacacacccagctctttttttttttttttttttttgagatggagtttcactcttattgcccaggctggagtgcaatggcacagtcttcactcactgcaacctctgcctcccgggttcaagcgattctcctgcctcagcctcccaagtagctgggattacaggcatatgccactacaccagctgattttgtatttttagtagagatggggtttcactatgttggttaaactggtctcgaactcctgacctcagctgatccacccatcttggcctcccaaaatgctgggattacagacgtgagccaccgtgtccagcctgcccagctcatttttatttatttatttattttttggtagagacagggtcttgctatgttgcccaggctggtcttgaactcctggccttaagtgatcctccacctcagccccccaaagtacttggattacagattacaggcataagccaccgcatcaggtctgtttaatttttaccattcagacagcactcaaggcctagtgtgagtggcctccatcgagggccctgggcttccctctaccctgagggttccatgtgcctcccaggttgaagccatgagagagtccagaactacccccaccccaaaaaaagtcttgctcatggccagctgagtgttccacagcccttgatttctgggtgtgtcataatgtagtcaccaagtcaggcctgtgggctgcctctgggtccttcctgttgagagtgatggcatgtcactgctggcttccccgaggatgagaggttcaacttgtttggttcggcccctaagattctcttacattacctctagctcagacactctgcttgtattggaaaactgggaggcagtgccttttcctctttcttcctttctgaaatagaaggtactcagtagatgttggatttggaatattggaatgaaatgaaggctgtgtgggcctctgggcagcctttggtgttagaaacaggcttcatccctgctggacttgagtttcagttgaggagctcctatctgggcagcactcttcaccagcaaaggctgtccgtggtcttttgaaaagagatcttttttagttcatttcttaaaatccagtgctatatgagagccagtctgatcttttctaaatctgtactttcattttgggtagcgcctaaaagagacacagcagtccctgttcaacctcttttcgggaaaccaagagccttggctgcttattcatcccttctctgccgttttcaacaacaaaccccctttgatgaaagaccattctgagacaggctagagctggttccccttttatttctcctcttttccaagctcccctctgccacctcctgtatctcttccaaccttcctcccccaaagaaaaacaacaacaaaccaaactttgaaaaaacaagggaggcttgtccccattggtgaaatcccttgaaaggatgtcactgagaaagggtctctgtggccctctttttccgcaagcgttgggaggtctctgaggatctgacctggggagactggagcgctaattatacgcacagaagccattcattagttgccactagcaagaagacttggccaatgctcactcctctgaattcagaggttttgaaagaaccccaaactgagcctgcgactttcttcaatctttttttttttttaatatatatatatttctttcttctccagcctctctgttctcctctgttgcccacagcaacctcagcagttggtaccagcacagagtggagagggcaggccaggttacctcggtgtcaagcaatcattactgagcaattcaccagagcctcacaaagaaacagatttctctgaaaatctcccgatccaaaccacccccaatatttaaccagcaactccccaaccctacctttcctgagaggtccgtgttttctagtacctgagcagacagttatgagccactgcctccctgcctttttgaggcctttctttaccaacaatgctttgttaactctttaacacactttcctgatgttcacactttctgcctaccacacacacgtccagtagagacagacaagggggagaattaaatgattagccagcagctgcccatgaggaacaggcagtcaggccataggtttttcccttttccgctttaccatgagacagtgctttgtcaaaaggaagtgccaaagttgtcatggaaataaatcattagctagattgagctatctttaatttgggcgggagtctgccattaatatgtctaaatctcagtttacaaatgagcacttgatgacttgattcctgacacttattcttgtgattcttttgaatctcaattagtaagactttctttctcatagaatgccatacggcttcttggaacaaaggacaaacgggtagaatgcttgaaacagaccaaatcaaagattatgatttttttttctgaagggaagaaaaaaataaaattggaaaaataaaaataaggcttatcatgatatcctgccgtctgatttctaaaagtacagttcctttaggttctaaggactggcatgttctttgtgatatttgtcaatgacatgtgaaatgtgctctgagtaaaggcattttcttctgcaatgttcatttctatttcaatggtctgcctcagtacttttctttaattaatactgtttatgctcactgatgaataattcagagttgtacaagcaacagatgtcagcggattcaaaatgactttccctgaattatttattatttccaaaaaagtaacaggtttgttgaacaagtaattggcaacacagatgtagatcaaggtttgtcagcaggcaacaagtttcactactgtttccccttttgtgcatgttgataaccaggatggcattgtctaggagcgggggtctgcctgataccactgcttagggagtcattgacccatcctgttgctgacttggagagctggaaccttagttggtttccaggttgtctaacgatgaaacatgaatggaaattcatccaaaaatgtaattaatgaatgtaggcttgtaaatatctcgcagacagaatgacttaatacaggtgcccagaaagagggaacatctttgtttgcagggatatgttaagaatagagacctagaagaaaaataatttgacagatatgtaaaggtttatgtataagaatgttctctgcagtgctgtttatgacagaatttttgcaaggagacaactcaacgtccaacaatgaaagactggttagataaattctggtagatccaagcagtgaaatattatatcaccactgtaatgatatatatgtatttttgatctggaaaaatgtcaacatattaaataaaagatgatattaagtgagagagtctataaaccgatatggcttatttctgtaggaaaatacatgtatgtatttttttttgtaggcatagggaaaagtctagaaggaactaccccaaaatattaatagtggttatttaggggtagtaggatccagcatgacttttcttctgtctcacatattttgccatcattttcactgtaagtatgcttatgttatgaatctcagttaatacgactttctttctcatagaatgccatacctcttcttggaacaaagcacacatgggtagaaggctaagctgctgtaacaagagatccaacaacattgtgacttaaagaaataaatctcaggctgggtactgtggctcatgcctgtaatcccagcaatttgggaggctgaggtgggcggagcacctgacatcaggagttcgagaccagcctggccagcatggcaaaaccccatctctacaaaaaatacaaaaattagctgggcgcagtggtgcacgcctgtaaccccagctacttaggaggctgaggcaggagaatcccttgaacccaggaggcggaggttgcagtgcgctgagatcgtgccactgcacctccagcctaggcgacagagcgagacctggcctgccttgttatcttctaaagagccaagtctgggtgctgtcgtgagaaggaaacatgggtatggaagaggcacaacttgccgtctcaaggccctggtccaaaagtggcccatatcactcctgctcccagcccttagcagggacataggcacatggccatactccactgccagctgcaaagcaggctgggaacaaaatccttacaggcatttatgtgaccagcaatagctctgtgctatggagaaaagagaaaaggaattttgctgggacagctttcggtctctgctaaatttattgattgattttcaaattttttttagatatgaggtcttgctttgttgcccaggtaggtcttgaactcctgggctcaagcgattcccccaccttggcctcccaaagtgggattacaggcatgagctaccatgcccagctgctactaaatttattacccgtaaaataaaaataaaaataaatttaaaaaggaagttgagttttgattcgatgtcttcagagggcatttccttttggaattaatcatacagaagatgtatactctgaagcaatttgaagatttaaaaaaaaaaaaaggaaaggtataaaatgtggacactgccttccagggatttacagtctgattgagaaaccggaccaataacaattcgaagtagtatatgcaaaaggccagagagtgttcagataagtgcagaggagcaaattggctagggtcatggaataaggcttagataaattgaaaggcttgcaattctgctttgttgagctaccaggattacttgtacttttggaagaaataaaactatttgtgttttgtgacattttagggtagcgtgacctccccttacaacacagaggaactgaatcatattttcctactgactgactaacagtaatttaagactctaattggtcttccgttagctgtcatttattgtaattctttgtgaaatgcacatgatctttaacataaaatatcttggaagagctacaacttaaaggaaacttgacttgataatgtaaaaattatcttttaaataattttttaaatatatggttttaaagctttttaatatggttatcttgagtagggtatttctaggcttatttggaaggcaaaccaaaaagcatagagagttttttttcctcccttggatagaaatttttctgtctttaatagattaatggtaatcatataacacattacctccttcacaataagatcaaattttgcaaatcttttgccttgaatcagattcttcaactctggagtttaggttagtagaacccaaaaatatgttgttttatgcacaaagcctcgcaaagtcaagtggtagattttgacctcttctttaacctaccctgaatgtagtcccttaaaacatgatggaatccacatttggtatttccctgctatttcatgagatgcaacaaaatgtttcaagggagacagtaggaaccatttggtgctttggtgatcttttcaggaaaatctggtttcggaagccccataaggcgagaattattgcaaataaggcccagatttgaaaattgctgttttgcaaattgtgcttattctaggaataatgatttctacagctgggaagaactttaaaaattgggtgaaccagttgcctgctttgacagatgaggtactgcaatgcagagaggtcaagctagttgctggggtcacctagctcatttgtgacaaaactaggaaccgtgggtctgactcagtcctctgccctgccgccctgtaccacagtaggcctctctatattatgccgctggtagtcacccaccttgcttcctaccatcaaaaggaacttctggtagaaactcctttcacagcctcctgatctgcaggagtgatgaatttagcctgggatgaactgggagtggcagagccatctttaaaccccaggtcctttctggatgctttgtttgcagaagagctgcagagatcatgagggacatttcttgattcatattaatcagaaactcatttggggcagaatttgaacttgtagccaattttataaggaagtttcacagctaaaacctctctgtgttgtaaaaggaggtcatactaccctaaaatgtcacaaaacattttacttcttccaaaagtacaagtaatcctggtatccagataaagaagttttaatttgtttttattggtttaccttgcctcagagttctgagtgttggattttcactgtgacaacaaaaataaaatatttcctgcttattgtaaagcggtcaaagagctgaaaagcaataccatcttttagaatgcatttcttacccttctttgatcaacattaagatgcgttgccactctggggtatgattctggtttgatcgttgcagtgttttggaaaatgtttgatggcctataggtttattgatttcaaagactgtaaatccatctgcccatctatccatcattcaccctcctatctgagagcagtgtgggaagcttctactgaagtaccaataacttggattggtagccttcaagccctggggggacttggtaattccacacttaagtttttctacctgaaaaacatatagctcttaaatttcaaaatacagcttcgtttatgcctgaagaggagaagtttcataacgcagccagcactgttggttgtcatgcaataaccattctcccttcacccttgctaacgttttctttctttttttttttttttttgaggtggagttttgctcttgttgcccaggctggagtgccgtggcatgatcttggctcactgcaacctccacctcccaggttcaagcgattctcctgcctcagcctcccaagtagctggcattacaggcatgtaccaccatgcctggcttattttgtatttttagtagagacggggtttctccatgttggttaggctggtctcgaactccccacctcagatgatccgcctgccttggcctcccaaattactgggattacaggggcgagcctccacacccagcctgttaataacgcttttcttcattccattttcttgcctgtgagatgtgcataagacccagctcagagagttgttgttggttcctactctctaactttgcctaattagatttctgttaagcttgagatcatttatagccaactttttccatattaaaatcataagcctctgttgaaaggttttgttagtccaaattggaaccgtcttgacttcgcatcaaatcattcatctctagctcagtcgccacataagcttgtataattctctcagggcttctgtcattgttaatttacatctgaccttgttctgaaaactatttaaggcagtggagccctaacttagaacttgctggcttttaactttgccagttggtctggacctgtgaaaatatttatccaatcccctaagaaatcagagtaaagattttcatgaaaacttctagccgggcacagtggctcatgcctgtaatctcagcactttgggaggccgaggtgggcggatcacttgaggtcaggagttcgagaccagcctggtcaacatggtgaaacctagactctactaaaaatacaaaaattagccaggtgtgatggtgtgtgcctgtaatatcagctactttggaggctgaggtaggggaatcgcttgaacccgggacatggaggttgcagtgagctgagatcatgctactgcactccagcctgggtgacagagcgagactccatctcaaaaaaaaaacttccaaaaccatttttacatattggtttattttgactcttgatcgttgtgccaagaaagttgattatgactagcgtttccatcttacaaatagggaaatggaaaactcagaaaggtcaagtgacttccctgaggttggtaaggagtggtagagccaggatttgaacctgggcagtgtagccacagggtcctcactcttaaccacttggctaaactgtcttcatatacgtatgtatgcatgtgtttggttcccggtggtgatgccatggggagcatttaccatgagcgcagtgggaaaagcatggagcatgctggaaggcatggatgcttacattttcattccggatttgtggattttgcactagggtatctgctaggccatgaactagaattgtgtactgagagtcatcattagttgggtgatttttttttttttttttttttgacataggcactgctctgtcgcccaggcagtggtgtgatcttggctcacagcaacctccgcctcctggattcaggcgattctcctacctcagcctcctgagtagctgggattacaggcactcaccaccacccctggctaatttttgtatttttagtagagatggggtctcaccatgttggccaagctggtctctatccacccacctcagcctcccaaagtgctgggattactggtctcagccgccgcacccggccaattagttagatctttctacggaagaacaactgacttgccaatttagtctgtaagatcaggagttgagggacattggaactacagaaaaacattattaaagatgactcttaagatgtcaagaggaaagaaaaatgacttcttcggtcaaaaaaagagcaaaagctatcacgctgtatgagccacaagctgaaggctgtcttctgggggcggcttaaatgcattagattagtctgcaatgtggattaagggaccgtgggatttaataacttgcgtattaaagaatggctctgcaaatgttactctaacataaaaatgtaagcattctaattgaatttagaagcaataatattaaaatttcttctggtgatgctccttagacgcattaaataaaatatcaaaagtcacaattgattaaactgaaactttagcatgagagttattaagcattaaattctgctgctagaggtttttattttattttttcctgacatgtactcagaaaattctccctttacataatttatggtcattctgctgtttaaatgtgccaaaaaatgttctcggagttttggcagtgttttgaaatagagtatattatcttagtcttgggctatatatatataatgaacactcaatatatattgatggtggtgttttcatgagttgaagtctcgctgtgggcaaaggaaggaataggctattctattacatctgatgcttagcctgcctttaatgagtaatgtagaaaaatagacctcttcttcctcctatggcaagtctgtatgtagtcttgctaagcttgtgtctgcccacaaatcctaatgagaagatggcattgatcggagatggtagcaaagtacagctgggatactgctgtccatatgttccatggttccagaattccaaggactacagacagccttgtagaaatcacaaagcatgagtgatagttataagcaaagaggtcttctcctttttatccaaggacaagcaaatggcagggaggcagaaaggtgacgttttgaatctgtagacacataacgaggaatgtggttgactgaaaagtgtctatgcatttagggcggtgagagcagacagttaggggcatccaggaaacctcctcctctcttgcctttcagggtgtctcctggagtcccgagtgtggcatgttctgcattcaagagtattgtggaggccagacgtggtgaaaccccatctctactaaaaatacaaaaattagctgagcgtggtggtgcatgtctgtaatcccagctacttgggaggctgaggcaggagaatcacttgaacctgggaggcggaggttgcagtgagctgagactgcaccaccgcactccagcctgggcaacagagcaagactctgtctaaaaaaaaaagagtactgtggaattcattcttatgtagctgtatgaaaaagaaaaccaacatcataaaatatgagtactagtttgaagtccattacagacaaatcacaccatttttatgttagaccaccccaaccacttcccttttttgtttttgtttattttgacaggttctcgctttgtcacccaggcggaagtgtagtggcacgatctcagctcactgcaacctctgcctcccaggttcaagcaattctcttgccacagcctcctgattagctgggattataggcactcaccaccacaccagggtaatttttgtatttttagtagaggtggggcttcaccatgttgaccaggctgatctcgaactcctggcctcaaacgatccacccacctcggcctcccaaagtgctgggattacaggcatgagccaccacacccagcctcctttttgttattgctcagatttacagaaatttattttgcaaaattttacctcgaagaaacaagcgagtgtttctctgtatccatctgagctcaggaggatgcccaagtgaaaggtgtttaatccaacttctgttgaatgattgacttctcagggactgttaatttgtaaactctaagaaagggggaaagtttaagtttttccggctgccaaactttgggcttcatggtgaatcatcaggacaggctttctaggccaagtgtaagcgctgttctgggggccactggtctgagggtgggggagcaggatgtgtttatttagatgcacggccagagttcacacacttggggtttgggatcagcctccagggcctaagtaatttctcccaggagatgtcttcgcatcttataccctgtataggatcatcacggactgctgattgaagaaaagggttaggaccactgatcagagagaagctacgattttttcttttctgtctgtcacagaggtgtcagtaaaggagaaagcttacttgaaaggtttggattaccgagcagctcaaaagagctgttgctggcgggattttctccttgctgaagtttttctttgcccctagaatactaagcaaaaaggaaagaaaagatgaaaggtaagtccctctttaaaaatacattgagtcaacccatcgcagaaaaatacagatttctcaactgacaaataagcggcatcactgcatttgggaatcagaaaaagtccccacgataaagttatttgggaattaatcaacacttggctcatcctaggcgtggagcgcttcggaattcacctcgtgttgcttggaagctggcagcccggttgttatataatgtgaacccagaggcctgccagacggccctccctgtgccccgggggagttacaaggctctgtaactcttggagtcagtcaatcctgcagaacagagtccaggggcctggtgtgtgctgtgttttacagatgacacattaacctttgaaattctgtcctcagtcaccttcatcaatgcctgagcgaacgaaggaagggccacatgtgggctctttttttgttcacttttccaaatggagataagacatgtaacaaaatttaccatcttaaccatttttaaatgtacagttctgtgttattaagtgcattcctatcgttgtaccagtatcaccactatccatctgcagaactctgcatcttgaaactctgtgcctgttcagtggtaactgcctgttcccctcctggcagcccctggcagccgcccgtctctgaatttcagagccactttctgtccctgagtttgactactctaggtactcacataagtagaatcacactgtatttgtccttgtgtatctatctggcttatttctcttagcgtaatatcctcaaggtgcatctgtgtggtagtgtgtatcagaatttccttccttttcaggagtgaataatattccattgtacggatataccatgttttgttcatccatccatccctccgtggatggacatgggttgtttccaccttttgactattgtgaatagtactgccatgaacacagttatacaaatacctgtttgagcctctgctttctgttctttggggtactttcccagaattggaattgatgggtcatacggtaacagactccttttttaaaaaagaaaagtatcttgagaacttgggagagccaccctaggagtacttactgggctggattgtttgctccgtctccttttgcctccaggtacagcccataggcctctgtcctcacagatgtggtatggaagagtggccctgttccagggtgagatcaccagtgtagaccttctcagtttgaccctacatctgatgaacccccaaaagcacagagaggatctcagaatgaactaaagatcatgggctataaatgactccttccttctccttttcttccttggatgacaaagattgtggtcactatacagttatggtggcctcaagtctggtaaatcaatgatgtttcatgttagctgctcacgggattcaccttgtggcttattgatgtccagaccccgcctctgatcccgcctctagagattctgatttcattggtttgagtcctggcctcagcatggggacttttgaaagcttccaggcgagtctaatatgcagccagggttctgtagcacccaagtgaattactgaacccgaaccttttctcaatccctttcatgctgtctgttgtctttttggttatttcttttttctttttcttttttaatttgagatggagtctcgctctgtcccaggctagagtgcagtgataggatcttggctcactgaaacctcttcctgccaggttctagcaatcctcccaccttagcctcccgagtagctggtattacaggtgtgcaccaccacgcccggctaatttttgtatttttagtagagacggggtttcaccatgttggccaggctggtctcgaacctcaagtgatccatccccctcggtctcccaaaatgctgggattgcaggcgtgagccaccacacccagccaggttatttctttggagcatatcttcagatttgtacatctcagcccaaggtttaaagatttggaaacaggcttttctgtgtgtgtgtgtgtgtgtgtgtgtgtgtgtgtgtgttttaattaacgaggatgcattatgtaactttggagctaagaatgaggaatgaggatgcattatgtaactttggagctaagaatgaggagacctgggtcatacttgtgtgtgtgtgtgtgttattatctaaccagggataatgaattatttaacttggcaggatctcagtttgttgttgttggttttttgttttttgttttgtttttttttaaatcttggctttaaaattagggcatagattggcaaaccagataaaagaatgaaattaatgatttttttaaaaatgtcccctctagctctgacataccacgactctgaatgaacaggtggaattgatggggagtgaggaggcttggagagagagcccccgggtgtgaacccatcctgttctaacaataatgagctttgggatgaagagcctccccgcaggcaggggactgctgggagtttctggtgtcccagaagaagccttcagggcagctctgatcagtaaataaaaggatacgaaataaaaatctcaaaggatccgtaatgaataagaaagcaggaatgtcgtccccagggagaaatgagttgggggctttgtcagtcacgagagaacatagcacaggactctgggtccaatggagctgaacgtcagcgcctctgtccccacgaaaatagtaacttccctgacaccatccacctgatgccaagagctgtttatatcaacatttcttctcgggattctttcaaactttatacttacttctctcctcctctgattctattcaaggaatgtgaatggctgaggttttgttttgttttgttttcctctctagattagcacagctaatacagtggaattgtgatgccagggtctattagtgtagagaaacaaagaatgcagtcctgccctgggcaccagggtttacttccatggtgacttcttcttaagcccatgggaaagtgagagggaggtgacctcctcacagtcggctcagcctctggagcccggagccggagccagccccatagtgtgtggccatcaggatgacgcagagaggcgtgtgaacgcagccggccgctgcagctggtgcacttgactctgggcagcgcgttcccaggaacccgcaggacactgaggaccgtgcgtgatgtaacccagatctgccagatgtgggagccagcatgagtcacaatgccgggccgttcattaagaaatgctttctgggtcatctgggtgcagggcactgctgcttccctgctgtccagggttggaggcatcaagtctgcccaccaggaatccccaagttcatgaacatctgtctaaaattatagcctggttttctgagctgatgtggcacagagcacacgcacgctgatggtctctggcttgtaatttgttaaaggatctcaccactttggttagtggtgggaaatcagataataaaaacatacgcccaggtgggagggtcacttgaggccaggagtctaagaccagctccagcaacatagtaagactccgtttctgcaaaaagataaaattacctgggcatggcatgcctgtagtcctagctacttgggaggttgaggtgggaagatggcctgagcccaggaattcaaggctgcggtgagctgtgatcacactactgcctccagcctgggtgacagagtgagaccctgcctcaaaacaacgacaaaaccaaaaaccaaaaaccccaaaagtgtaagttgctgtgaggtttctgcacattttagtaacatcagaaatgaggtggggtgttgggagaagccaaaaactctgctggcattgtgccagtgaaatgccagcaatcacgagcggtcttcctttttttttctttttttttaaaaaaaaaaaagatgtgcaagatgccttatggtgaataacaagtatatttctgagaagttgtaaactaactccttaaaaaaaatccttatggatataagacatacagtcagaaaagttcatgcatgcatccctgggtaaaatctgacacccaagtaactgtagcaagttgaagggtggccccttaaatatcccccagagcctgtgaatatgatcttatttggaaggagacctttgcagacataattcaatcaaggatcttgagatgagatcattctggattacctaagtggaccctaaatccaatgacaagtgtccttacaagagacagaagaggagaagacacagacacacaggaaggaaacatatgaagcaggaggcagggattagagcactggagctgcaaggaacagctgagccaccagaaaccaaaagaggcaacaaacgggtggtcccctcgtgcctttggagggagcctggccctgctgacaccttgatttcttttttctggcatccagaactgtgagccagtaaactctgttgtgtgaagccaccaagtttgtggtgatttgataaggaaactaataaaatcatcacacctagatgaagaagcagaatgtttccaaaaccctggaaactccccctcaagcctagtttctgttttcacaccgccccaggacagctactgtcctgatttctaacgccggggataggttttatgccatttgaacataataaatggaatcttacggtgcatcgtcttctgtgtcagatttcttcccctccacgctttgtgagatgtgtttatcctgttgtgtgtttgatgattctcactgctgcttagttgtagtgttccacggtgtgaatataccacgatttatttactcttctcctgttgggggcatttgagtttggggctacgacaaagagtgctgttacaaattctgtttcgttcctttctgatgaatatacgtgggcgcttttgtgagttacattctcaggagctgaattgttgggtcataggctatctgtgtgttcagcttcagtagctattgccagttttcctattaattttttaaacaccccatccgatttggaatctctgtgtgaaatggagaatccaatggtagattcagtaaccactctttaatgtggctattttataaggtccaaatgttgaacgcagggttttcttggagcaagttccttccttagatcacaatcaggaatattccatgtctcagaagagcccattacagggctgggcaggcgtgaaagcacaccagtttctgggaatcggagaggctgggctactgactgtgaattttaaatattcttaacccatcgctggagtgatgaatagcacagctgtcgtatcctccatctcgagactcagaaataaatttgcagtcttttaggagctccagttttaattctcctttccagcttttaagctctatgctccataacttaggatgcaaccaaatgatatgcagcatttctaaatattctgctttgataagtgagtggaaatagtgctggtacagcggataagactagattaaaacccagggtccccagctgtctaaagaagatgtgctgctttggatttgcctgatgccccaagatctttctggaaatgggggagggtggctttgaccttggaaatactggaaaggggaggaaagtgtggtgatggtacctcagaggactgttttccctccagacgtgagatgggtgggatggtagcaacctagctatcattatgactgataagccttctttttcccaatacaaaagcaatttgtcttccttgcagaatgagaaaaattcaggtccaccagaaaataaccacaaacctgacacccacagttaaccactgttgaatatatttgcatatatacatttcatatacaaacctttcttcccatacaaacattttatttctgcagtcaacgagtatgtattgaatgcctgccatgtgccagtccccagggatagagcatgaataaaacagacaaaccatcccctgtccttgcggagctgaccttccagtgggagcttattatacgatacatatggtactaaaatgagatcttatggtacatgtttcttatcggttgcttttttccactaacaatatgtgtaacctctttctttctttctttctttctttctttttctttctttctttctttctttctttctttctttctttctttctttctttctttctttctttctttctttttgagacgtagtcttgctctgttactcagactggagtgcagtggcgcaatcttgactcactgcaacctctacctcctgggttcaagcaattctctgcctcagcctcccgagtacctgtgattccaggcacctgctaccacgtctggctaatttttgtttttttaatagagacagggtttcaccatcttggccaggctggtcttgaactcctgtcctcgtgatccacccgcctcggcctcccaaagtgctgggattacaggcatgagccaccgtgcccagccctgtaacctctttcaatggcaacagatattcagatataacttttatagatttatcaatgaactaaatccccagtggttttgcttgctggtggtggccagcacattcggagatggtgactgctctgacagtacaggtcccagagtgccaaaaggaccagggtgctgccattgacttgcagaagcaagaagtaggctgggtgcagtggctcacgcctgtaatccccaggaatttgggaggctgaggtgagcagattgcttgagtccaggagttcaagaccagcctgggcaacatggcaaaacaccatctctacaaaaaatacaaaaattagtcggacgtggtgctgcatgcccgtggtcccagctactcagggaagctgaggcaggaggatcatttgagcccagggggtcaaggctgcagtgagctgtgactgtgtcactgaacttcagcctgggtgacggggagacctcgtctcaaactggcaaaaaaaaacagcaacaacaacaagtagaagtaaactttggcaatattgagccatggagttgtttttttttttttttttttttttttttttttttttgagacggagtctggctctgtcaaccaggctggagtgcagtggcgctatctcggctcactgcaagctccgcctcccgggttcacgccattctcctgcctcagcctcccgagtagctggggctacaggcgctcgccaccaggcccggctaatttttttgtattttttagtagagatggggtttcatcatgttagccaggatggtctagatctccttacctcgtgatccgtccgcctcagcctcccaaagcgttgggattacaggcgtgagccaccgcgcccggcctctgagccacggagatcttttttaaaaaaacttttattttaggttcaggggtacatgtgcaggtttgttatacaggtaaactcatgtcacgggggtttgttgtacagattatttcatcacccacttactaggcctagtagccagtagatacgttttctgatcctctccttcctcccactctccaccatcaagcaggcccccaatgtctgttgttcccctctttgtgtccgtgtgttctcatcatttagctcccacttgtaagtgagaatatgcagtatttggttttctgttcctgcattagtttgctaaggataatggcctacagctccatccatgttcttgcaaaggacgtgatctcaattcctttttgtggctgtatagtattccatgagctgtggagatgttgaggttctttgttaccaagcattaactggccagtcctgaccaatacagctatggtcataacatataaagcaccttaagggaagaggacgtttagctaactctatgatgttgtcacgctgacatgaatagagagggttttgttttttaagccaaagacgttaatccattaattggcatttaaaaggtagaaatgccattggatgtaggaaagttcatctgtatttgaccattttttatttatttttgactctttatgcttataattttggaaattccaaaatacaaaggagtttttggtgatgctgggaattgaattctgaggagaaaatgttgttggaattatagagagtgcttttggaatactaccaagcatagtacttgaccttagaggaaaaaatgctggggagcacaacttaagatgggaaaaaagaacaagtttttaaaatatcatccctctaacgaatgcttccgtgatggaaacactcccctttccctgttatcgttcttcatttcctcctactctttactttaactacaagttcttgtatgcggttattcccccatgtaaattacatgaaaaatagttttagtcttctaactacattatccaatatgcagctttttaactagttccaagaggcatttgaggcccatgcgtggctccctttgagttgagtcatctaaaggttattgctcgtcttagtaaaacctgtgctgtgttgagtgcaccggtgacgacaatgaccccagtcttgagtcccagcctccccgtgtttactatggaattatcacagttccactcttgagaaatatggaaagcactcactgttcactctggtttaaccctcctgagagcaggaggtatgattaatcctggaaataatgggttcactctgtgggagcgcttcagtgattttcaaccccagactcatacatggtgattgaaaagaactagtgtgatcacagaaggttagcagaattatttctacttagaatagaaatgagaaggttgagggtcgtaatttcaaaaatggaaaagtaggttttaaaaattcaaatgtaatacataaatattccaaatatatttagagcgagaagccttctttccgccctcccaattctgcccttctctgcagagcttaccatagtttaaaaaaaaaaaaaagtgctgttttatccttttggaccctatactgtgcatttataaatgtgagaaaaccaggcatggtggtgtgtgcctgtggtcccagctactcgggaggctgaggtgggaggatcgtttgaacccaggagttcaaggctgtttttagctatgactgttccggtgaatagccactgcactccagcctgggcaacacagtaagagcctgacgttaaaaataattaacatgagaataaaacttatctatgttttttgtttttacataagtagtcacacaagacatattattataaacctccttttttttttttttgagacggcgtctcattcagtcgcccaggctggagtgcaatggcgcaatcgtggctcactgcaacctccgattccccagcctcagcctcccgagtagctgggattaaagcttaatttataatggaagtcaccctgtgcaggcacacttataggtactgtattctttggagcagtagctcattaaattgataaataaaactttattttcttaatgatggacatttaggaagtcgtctttttttttttctattacaagtaagataaacctgtgtctccataaacttgttcgtgtcttttttttttttttttttttgagatggggtctctgttgcccaagctggagtgcagtgatgtcatcatggctcactgcagtctcgacctcctaggctcaagcgaacctcccatctcatcctcctgaataggtgggaccacacgtgtgagccaccacgcccagctaatttttgtattttttgtagagacatggtttcgctatgttttccaggctggtcttgaactcctgcactcaagcagtctgcctgcctcggcctcccaaagtgctgggattacaagcgtgagccaccatgcccagcctgtttaggtttttgtgcacttgtgtatttttctttcttttttttttttttcaagatggagtctcactctgttgcccaggctggagtgcagtggttcaatcttggctcactacaaccttcattttccaggctcaagtgatcctcccacctcagcctcctgagtagctgggaccacaggcatgcgccaccaggcctggctaattttttgtatttttggaagagacggggtttggagttttcaccatgttagccaggctggtcttgaactcctgagctcaagtgatccacccacctgagcctcccaaagtgctaggattacaggcgtgggccactgcgcttggcctctatcttatgtttattatccatgtgtatatcatcttcagaaactggctccctcatatctcttgcttattatttccttttgggttatctttttaattaatttaggaactctttatatattagcaatattaatctttaatattggccggacatggtggctcaggcctgtaatcccagcactttgggaggccgaggcgggcagatcatctgcagtcaggagttcaagaaaatactccattgtatgtatataccatattttctgtatgcattcacctattcatgaacatttaggttgtctccaacccttggctcttgtgaataatgctgcaatgaacttgggtgtgcaaatatctctttgaggtcttgttttcaactcttttgggtatataaccagtagtggtattgctggatcatgtggtagttccagttttaattttgttaggaagcttcatattgttctccatagcggctgtgctacttgacaagctcatcaatggtgtgcaatgattccagtttctctacgtccttgccaacacttgttattttctgttattttgatagtggccttcctaacgagtgtgaggtgatatcccattgtggttttgatttgcatttccttgatgattagtggtgttgaatatcatttcatatactcatgtactcactagtcacttgtgtatcttctttgtttttttttttgtttgtttttgttttttttttgagatggagtcttgctctgctgcccaggctggaatgcagtagcacgatcacggcttattgcaacctctgcctcccaggttcaagcgattctgttgcctcagcctcccgagtagctgggcttacaggcacccgccaccatgcctggctaatttttttgtatttttaacagagacagagtttcaccatgttagccaggctggtctcgaactcctgacctccagtgatctgcctgcctcagcctctcaaagtgctgggattatgggcatgagccacgtgcccagcccgtatatcttctttgaagaaatatctattcaagtcctttgcccgtttttatttattttgagaagcagagtctcgctctgttgcccatgttggagtgcaatggtgtgatctcagctcactgcaaccttcacctcctgggctcaagtgatcctgccaccttagcctcctgagtaggtgggactacaggcaagtgccaccatgcccgtgtaatttttttatttttttgtagagacaggggtctcaccatgttgcccaggctggtcttgaactcctgggctcaagcaatccaccctccttggcctcccaaagtgctgggattataggcatgagccactgtgcccggccagcctgaggaatcttaggaaacaaagtaaagaccttggcctgaatagctggtctgctacctccctacttcctactgcccagaggcaattacagtcatgcaccatataacaatatttcagtcaaggaaagatcgcatatatgatggtggtcttatgagattataatgctgtatttttactgtaccttttctgtgtttagatacacatacacttatagttatgttacagttgcctacagcattcagtacaatagcatgcttttcaggtttgtagtgtagaagcaacataggtgcgtagtaggctacaccatctaggtttgtgtaagaacattctatgatgtttgcacgacagaatcatttcacacatttctcagaacatatccccatcgttaagcaatgcatgactgtacatctgttcttagttcttccattggtgagcctccatcgttttaaataaatgcatatactgtatgctctttctcaatgtatcagttttagaattatccatcttctccccttgaatatataagtaggctgcagaggatttagtttgcttgtactgcttctcagcttatcttcttctgatggttaatcattttaaacaattagttttagttctcttagctacctctagttattgcatttctgtctctgtttcttgttttgtcagttttcggcaatattctctttcctttctaaataaaacattaaggccttaccctttcatttttctcccttttacgttgtccaaattctggataaatgaatatggtatatccataaatgggctattatctggtaataaaaaggtatgaaattctgatatatgctacaacatggatggaccatgaaaacatcatacccaagtgaaagaagccagacacaacgagccacatattacatgattccatttatatgaaatatccaggataggcacagaaagttgatgagtcattgccaggggcctcgaggaataccattaactgcttatgggcaccaggtttctttttaggataaggaaaatgttctgaaattagatagtggtaatggttgtaacaacctcatgaatatactaaaacccactgtattctacactttaaaaggacaaattttatggtttgaattatatctcaatttttttttaagattttttttttttttaattgagagaaggtctcactctgtcagccaggctggagtacagtggcacaatcacggatcatggcccatggctcacggctcactgaagcctcaaactcctgggctcaagtgatcctcccacctcagcctcccgagtagctgggaccgcaggcgcgcacaccaccacacttgacaaaattttttttttttttaagtggagacaggggtctctctatattgcccaggctggtctcaaactcctgggctcaagcagtcctcccatctctgcctcccaaagtgctggaattaaagacgtgagccactgcacctggccaaaagaaagattcttaactgttacattccatttattccattttctaatcttaatatctttagcttatttctgaatgttggacaccagtaaacaacatttattgtcgctgtgtaaacattgcccactgcaggtctaggtgctaatgtcatattattactttctctataggaccaatgccacaatccacaggccacctagaggatagcatttcatgcatcgcagttcgagtgaattctcttttcttatttaccatcgactattccttttgtgttttcctggaattccttcttgctttctttttcatatagaccccaaaaatacactttcatcacctagtgctgtagatgcactccgggttatatgacatctccttacttctcagccatcgtcatctggctccaatctaccagcctgtcctgtctccttcgctgccttgtctcaacattttattaaatttatttcttcctcttttttgttccattcccttattttgcaaccttttggatgttaccctttggaagttaccctcttgtaacttccacattaaaagtttgggggctggctgggtgcggtggctcacgcctgtaattccagcaatttgagaggccaaggcgggcagattgcctgaggtcaggagttcaagaccagcctggccaacatggtgaaatcctgtctctactaaaaatacaaaaatgagccgggatgtggtggtgggagcctgtaatcccagctacttgggaggctgaagcaggagaattgctcgaacgtgggaggtggaggttgcagtgagccaagactgtgccattgcactccagcctgggcaacaagagcaaaactctgtctcaaaaaaaaaaaaaagtttgagggaagtaagctttctaaattctagcatgcctgaaattctcgtcattttggtcttctgctttgtcggtgcctcagtttcctcatctgtacaagggaggtgatcataattacactgacctattagtgagtattaaattaacgaggattaaatgagctattgtgcagaaagtcttaagacaacttttggtacatcataaatttgtttgggaggcgttaaccattcacgttgtagttgaagcacattagatgtgtcttcgtgttctgcactctgaagacatcgtgtggactaacagcaaagtaataagatgaaagtttgtgtggtgaagtaaacgatcctattaccatagttgaaccatagcttatgaattattccttagtgctcttctctgctttcataaaatcataatccgtgttttaagatttacttgtacttttttttttttttaggccactaggctgttctcagctctctagatactcagcaaagcacagtcatttccaggaaatggattgaaattgtaatgcagatttggtttagatgtatgcaagtggctttggagagtaacaatgcaatctacttaaggagattggaaaatttaggatattgaagatttaaggaacgggttggcccaagtaacaaaaccattgccctagtcaatctatagtggccacttggaacactggatggaagaggattgggggcagcattggggctgttgtcagtaagtgacatctgccatggggtagaagggtttgtcattcctggccttaccttgatcctttctcatgaaggaagtacaagatattattgagaggatctgacagggagaattggtctagttttgggtactcgaggaagtttgtgtgaagtaagattattgcattgcattgcattgtattgtattgtattgtattgtattgtattgtattgtattgtattgtattgtattgtattgtattttagagatggagtcttgctctgtcacccaggctggagtatagtggcgcgatcttggctcctctgcaacctccgcctcctgggttcaagcgattctcctgcctcagcctcccgagtagctgggattacaggtgcatgccaccactacgcccagctaatttttgtatttcagtagagacggggtctcaccatgttggccaggctggtctcgaactcatgacctcaggtgatccacccaccttggcctcccaaagtgctgggattacaggggtgagccacctcgcccaggctctatttctttttaaaggaagtggagatgtcaaagaaaacatatttgttgtgtagagttttagaaaataaagttaccaaaaactcaaaataaaagaagtagatttattgagaagtaagtctacaggttgtactggggttggggtgggagtgctccaaggattatggctcctgaatttcccattgtaggactgggtaaaaggtggtaggaactagaaaaaaaatgatatcacttaatgaccactttgtctcataaatgagatgactaaagcttaaaaggtaaggtgactcactctgggtcacagagctggcaatagaatccagtggcctggttccatcttgacggggagggagggggcattgtttgttgcccaggtaccatgtcacactctgagtaacttctctgcagcccttgtattttctctgtaggggacaagggaaaacttaccctttgtttcttgaaacaaaggcaaattaataggggaaaagccatacaaatgattagcgtgcatgggaggaaaatcacaaagcgattacccagtatcctaatggggtacagatgtttatatatcttattttttagaggaaagggagaggggaagtgtggatgattttagggaggtagtagatgatttttagggaatttgatgggcctgaagaacatacaatggattgggacaaagtctgttgggcagacaatggtttgtgacaaaattctgtccaggtgtgttgaccgaattcaggctttctttatgcgatatgagttcagttaatgaaaacacaggggagtgaccagaagtgattgtttccttctttggcgtttctgtcttcctctttttttgttctattcccttattttgcaaccttttggatgttaccctttggaagttaccctcttgtaacttccacattaaaagtttgggggctggcagatagaaggaactccagagaacaacttgattctgtgctttgggagagacagagaaatgaggggtgtggaggaaggtcagagagaccctgaggcttctgcctcacttcagcatgtcaaagcaccctattttggggtattgctttctgagccccaacatctccagccttccaggagtctgtggcatatccttccccaaaggagtaggatcacttgaccactctactgaacctaagttgtttttcattttcttttgcatctgccttgaagtctagagcaaatgaaaatacaacaacactgtgtaaacaaaacacacaaaaaagctgctctgatctttctgttttctcaggtgcaaaacaggtcttatctaaagcaactgaaaaggcatggaggtagcaattgctttgctattccaggaactagtagccaccacatgtgtaaaactattgaagaacaagttttcaaccttctgctgtgaaaaggtacacaggaatggctaaagtctctctagaacccgtaccttcctggagcaaagggaagacctgggaaacgttttgacaaagcaatgcttacgatatttttcaatatcaggggaattcagtcagtcttctttcttttttgtttggccagtttagctaaagttttgtcaattttgttgatcctttcaaagagccaacttttggttttgttcagtttctctgttatttttctattctctagttcattagttaattaatttaggttaattaattaatttaggtttgacttgctttttttgttccgctgtcttcaggtggaaggttaagttattgatgcgaaatcattttcttttttaatatatgcatttacagctatacacttctctttaggtagcacagccttagctgtgtcacttaagttttggtatgttgtatcttcatttctaatcatctcaaattattttctactctcccttgtgatttcctcttaaacccattggttatttgtgtgtgttgtttaatttccacatatttataaattgcctgaatttctaattctattccattgttgtcggagaacttgccttgtatgagttcagtccttttaaatttactgaagtttgttttatggtctagtatacggtctatcctggagacttccacatgcactgaaaagagagtgtattctgctgtgttgagtgatgtgttctgttgattttttaggtctaattggcttataatgttcaagtcttctgtttccatgttgatcttctgcctagttgttctatccattattgaaagtggggcactaaggtctccaactatagttgtgatagtttagtttaattgtgcatttctcttaccaattctgtcaatttttgctttatgtatttcagggctctgttaggcacatacctgtttatcattgtatcttcctaaggaattaccctttgatcattataaaatgtcccactttatctctggtaccattttttgttttaaagtctactttgtctgatattagtacagccactccagctttcttatggtttactgtttacatgacatatttttcctgtcctttaattccagtctatttgtaactttggatctaaactatctcctatagacagcatatagttgggtcttttttttagtagagatggggttttaccgtgttagccaggctggtctcgatctcctgacctcatgatccacccaccttggcctcccaaagtgttgggattacagacgtgagccaccgcgcccggcccaagttgtttttgagaacacctgtagggagtgtttcctagcctttgcatgtgttacgcttgcacacagatgacagattggccatatgtaaaattttggagtaactctcttttccctcgcaattcttttgatggtgtttcttcgtatttttggcctccccctctacctggattgcactggagcctgctatcaagccttgtgagacgtgccttttgtccagttgttgatcctccattgttactccaccctttcctgccctcctgggcactgggcaagccttagtcccactcagtccctttcccttttctctccctcctccctcaaatcatcatgcttgggctggcgagatattacctagggctactgaaaagtcactttactatgggcaagcatataaatcatatttgtaactggcttttacctactgaaaaaatttcaatatattttaatgtgaagagacactgctgaagaaaaggaaatgaagaaaaggtgaagtaagattttacacacattttcagattagatgatactaatgttcctgaatatacaatctccctttagatttaagatattgtttttagtttagtttagttttgctttgtttttcaaatcactgccctaatcatgaatttcagtctttgggagaaggaatggccctcatggggtggggaaagcagtagttttttcaggtgtaactgacttttaattgacacaaatttacaaatttatattacacaagctgaaaacaatttttttctgtttaaataatgtatttgctatctgaatgatcatgtaaattcaggacaggatttgcctatttttattttattatactaataataaaaccccaattcaaatgacttttgagtacttactatacgcgatgtactgcgggtaaacaagaaaatttcttaaattctcattcaataattggaaatcgattaaattacacctatactaggagagattttatgcaaccattgataatttttgaagaatatttaaagatatgggaaatgctgataatatattcagttagaaaaagcacatttcaaagtaatatattcagtataattttcatcgtatctaaaaaaaattcaaaaccagaattcaaaactaggaagaatatgtacccaaatgttaacattgtctatttctggatttgtttttttaaaaaagtttccttattctaatttttctagaatgaaaacaaatcgatgctataatcagttgatagtatggtggtggtggtggtttcttgtaatgacatagacctactcgttaggattgccaggaatggacacattcatcccacttcaacgagtcactgtgacctcttagaaaaggtgggatagaggcagggccttgatggaagagtaaaatattcatagatgaatacatagaaagaatgactgagtcactgagcagagaagccacgctgagaatgtgtgcagaacagagcaggcaagcagtcagtaaccggggtggatgatgctgagactagggtgggtatgagtcaaggccgagtccgagagctgcaaaaacttgggagaggagttcagatgttgctgtgtacgttggagaaaatcattaaaggtttcagatttgcagtgagatttagatctgtctggccacgcatggtggctcacacctgtaatcctagcactttgggaggtagaggtaggcggatcactttaggtcacaagttcgagaccagcctggtcaacatggtgaaaccccatctccactaaaaatacaaaaattagccgggcgtggtggcatgcatttataatcccagctactcgggaggctgaggcaggggaatcacctgaaccaggagatggaggtttcagtgcgctgggatcgtaccgctgcactccagcctgggtgacagggcaagacttggtctcaaaaaaaaaaaaaaaaaaaaaaaaagagtagaactgtgttattgaaggctgggagaccaggggcaggagagcatttaggaggtgtgctcctggtttgttctttctcttactggtccttctcagtgtccttcctgggtttttcttccttcccctaccccttcactgttgttgctcctgggtactgtttagtgcccatcgctccatggcttcactgaccatctgagtgctgtggtcttctgaccctgagctgcaacctggatcgctttcctgggctgcaaaccaggatgtgtttaaacatgtccaggccacctagttgtccccggaatccttaacctcacaggaagttattttttccaaagcctgctcctcctccttctatatttaattcccaagagtaatctccgttctcccatcctaccagttacgcagccagaaaattgaatgtcctcatgaaatttgcaaagctgttaccagaaaggggccctgatccagaccccaagagagggttcttggatctcaaggaagaaagaattcaggtcgagtctacaaagtgaaagcaagtttattaagaaagtagagaataaaagaatggctactccataaacagagcagcctggagggctgctggttgcccagttttacggttatttcttaatgatgtgctaaacaaggggtgggttattcatgcctactcttttacaccatatagggtaacttcctgatgttgccatggcatttgtaaactgtcgtggctctggtgggagtgtagcagtgaggacgaccagaggtcactcctgtcgccatcttggttttggtgggttttacctgggttctctactgcaaacctgtttttttatgacctgtatctcacgccgaccttctgtctcatcctgtgacttagaatgccttaactctctgggaatgcagcccagtagatctcagcctcattttactcagcccctattcaagatggagttgctctggttcaaatgcctctgacaaaaagacaaatacttagctgaggtaccttcaagaggcaaattcatagagtcagaaggtagaatggtggttgccaggggccagaggggagggaaacgggaagctgttgtttaaagagtgtagagtttcagtttgtggtgacggaacgttctagtgatggctgcacaacattgtggttgtacttaatgcaccaaactgaatacttaaaaatggttaaaatggtaaatttcatgttatgtatgttttaccataatttaaaaataaaaacaggccgggcttggtggctcacgtctgtaatcccagcactttgggaggccaaggcgggtggatcacatgaggtcaggagttcgagaccagcctgaccaacatggtgaaactccgtctctactaaaaatacaaaaattaaccgggtgtggtggtgcacgcctgtaatcccagctactcaggagcctgaggcaggagaatcacttgaactggggagatggaggttgcagtgagccaagatcacgccactgcactccagcctgggagacagagtgagattccgtctcaaaataaataaataaataaaataggccgggcgtggtggctcatgcctgtgagtactttggaaggccaaggcgggcggatcacgaggtcaggagttcaagactagcctggccaatatggtgaaaccccatctctactaaaaataaaataaaataaatagctgggtgtggtggtgcacgcctgtaatcccagccacttgggaggctgaggcagaagaatcgcttgaacccaggaggtggaggttgcagtgagccgagattgcaccaccacactccagcctgggcaacagagtgaggctccatctctaaattaaattaaattgaattaaaaataaataaataaataaataaataaataaataaataaataaaacgtgttcaaccgggtttgacttagtttttcctcagacttatttgactgtggtcccctctgatcagaagaaaaaaatgctttaaagtgtgacatatatcacatcctttccatgttagaaaaacacactttggggaacattcccacatacttgggggtggggaggaagaatcaacttcctgagtgtattaactcagagaaatattattagaaatggtggctgagtttttatttgggggaattttgggtcaattcgtcttctctgagcaagcctaatgacgtcatttctatgaatggatttggagctttgaaacactttagcctgaaaagaaacgtctagaacacagccggctcaaatcggagaccaattgacttcaatgagtcttaagtacacaatctgctgcctttatgcagaggtttgggaattattttggaaagataggaggttcctcctattgggaggcttccagtcagtatcttagatctctaagtgctgaaacacttgaagctgagcacagggcattgggtgagtaaagggaaagtgaaatagacagccttgggcaacacatttgtccttccttcctctgccccaggtcctagactaatctgggtctaaagcaggagttgcttaagagactcagcccacacagtggcttcactgtctttcactctgtctgcagatctgggaatcagagccccctctggcttctttggccaccatgtggcccactttcaggacaccccgaacctgccttgtcactaatccctgcgtccagagctgatgtgcgcacccctttccttctctccaagacccccattcctaacagcattcctgcccctctttagacccctgggctggcttttgctttggttgcctttctcagttccttcttcagaagcctctctaatgcctcaagcccttcactactcaagagggcgcccttgaccgcctcggcctcccaaagtgctgggattacaggcgtgagccaccgcgcctggccattttttttctttttgagacagagtcttgctctatcactcaggctggagtgcagtggtgcgatctcagctcactgcaatctctgcctccggggttcaagtgattctcctgcctcagcctccctagtagctgggattacaggcactcaccaccatgcccagctaatttttgtatttttagtagagcaacctctgttaccgcccttgtggataaagactcccgggtcccatcctcattctctcttccccactactcagggattggaatgctgccttgaaatttcagcattaggcccccttttccatgccagcgtattgtttcttctacttgaaaagtacatgttccttataaaaacttcaaacctcatagaagtatctttcccacaattatctcttaggtaattgccattaacaatggacaatatatttttttagatttttctttttctattcatatatgagtacacgcgtttgcattttagcaaaactcctgctatacctactgttttgcagcttactttccttcccccacataattatgcaactggggcatctttccatcttggcaaggagagctctatttcatgatttaatagctgtattgtatttcattgtttggatgtaccatgatttatctaacggatcccattgatggacaactggagtttttccagctttgttattgcatataatgtagacatgaataatcttaagcacataaatctttgcacaattgcaaaagggtttctctaggataaattcctaggtagagtagctaggtaaaatggtaagaacatctttaattttaatagacgttgccaaatcatcttcctaaaggacttaaccattttgttcttccaccacattgtggaccgaggtcggttcccttcacctcgtcaatactggctagctgttctttttctttttgagacagagtcttactctgtcactcaggctggagtgcagtggtgcgatctcagctcactgcaacctctgcctcctgagttcaagtgattctcctgcttcagcctcccgagtagctgggattacaggcactcaccaccacgcccagctaatttttgtatttttagtagagatgaggtttcagcatgttggccaagctggtctcgaactcctgacctcagatgatccacccacctcagcctcccaaagtgctgggattacaggcatgagccattgcacccagcctggctagctttttaaatttttaatactttgatagatgggaaatgttttagtttacattttaaacatttgttttgcaggtcttcccattgcaaaactctagggtgatactgattacttgaggttgaacattttcatatgttaattggccatttgtatttcttctctaaatttctgcctggtctcctgctgatgatgcacttgaatttcgcattgctgttctctgcctgccaggatggaaaatctattccttctcttcagacctgcccttccctgccccaaggctagagagtgatgtccagctcagaacttggggtgagaaagatccacgttgactcccaactactccactagtatgtgaccttagacctctctaggtcccagtttcctcaaatgaaaaccggatttgggggccgggtgcagtggctcacgcctgtaatcccagcactttgggaggcccaggcgggcggatcatttgaggtcaggagtttgaggccagcctgatcaaacagggtgaaaccccgtctctactaaaatacaaaaaaattagtcaggcgtgatgatgggtgcctgtaatcccagctactcgggaggctgaggcaggagaatcgcttgaacctgggaggcggaggttgcagtgagccgagatcgtgccactgcactctagcctgggcgacagagtgagactgtgtctcaaaaaaaaaacaaaaaaaaaaaaaacagctggacttggagccggaagatcagaactgttaggctctatcctgtgttctcaggtaccctgaacttgcttttagagtatttatattttattatcattttttgtttatatatcgatttctcttattagactctaaactccttgatcacaaggaccgtattatccatcctcacatctttggtgtccaggatataatggtgttcactcaatattttccaaaacatttaatttttgagaattttattgacttttttttttaccataagaaaagctgcgttctaggtgccatgagaatacaaaaaatatttaaaatgtagttcatatcttagttggggagataagctcgatcactcattcattgagttattcaatatatccggagttatctaagctccagccagcttggcagtatctgaaaagataaagtcaagttgtgtaccccacacttaagtggcttccaatctagtaggggagacagatataaaataaacacaacataatgggatgcacacaatcatatagaaatcatataataattattaaaaatatatagtaaggctgggcacagtggctcacgcctataatcccagcacttagggaggccgaggcagatggatcatctgaggtcaggagttggagaccagcctggtcaacaaggcgaaaccccatctctactaaaaatacaaaaattagccaggcatggcggcgggcgactgtaatcccagctactcgggaggctaaggcaagagagtagcttgaacccaggaggcaaaagcgagctgagatcccaccactgcactccagcctgggtgacacaggaagagtctgtatctatatctatatctatatctatatctatatctatatctatatctacatctacatatgtgtgtatatatatgtatatacatatatgtatatatacatatactatatttttactatatgtgtgtgtgtgtatatatatatatatatatatatagtaaaaaataaataagtaaaaacagtcacagaagaattatcacaaagcagtgcatgacttggtagttgccaagtgggagtaaagctcactttgcacttaatgtgttctaggagtcactaagggcataggaagaagagacggctggaagggggcttcccagtgcaatcaatgagtggtcacgtgtgtgtcagtacagcaaagaccaagaaggcttgcaggaaaaacttgttgaattctctttgacctaatgtcacccacattcatttaactgtgaagctcttttcctcccactgcttagcatcctatggatctatcattctttaaaatcgttatgggaaattctggtgtagataccatttgtaattagatagtgtctcttaacctctttggaacataggccttttgagaaatggatggtcggaggggattgtgcacaattctgtgctcttcgaagcccaccgaagacccgcctccatgatcagggaaagcaaagaagggaaaaaaaaaaatcccaggtagtgggagtatctgtgtaggtcgagatagaagagggtagaagatacggagcttgttcactgccgggcagttgactgtgagggagagactgtgtggggagggggacaccaactgtggaagacctcaaatacttggactacttggtgtagaattcacgggttttttgtttttgtttttgtttttgttttgagatggagtctcgctctgtcttcgaggctggattgcagtggtgtgatcttggttcactgcaaactctgcctcccgggttcaagcagttcttccagcctcaacctccgagtagctgagattaccggcacccaccagcacgcccagctaatttttgtattttttagtagagatggggttttaccatgttggccaggctggtcttgaacccgacctcaggtgatccgcctgcctcggcctcccaaagtgctgttacaggcgtgagccatcatgcctggccaaattcacggttcttgataactgatcaactgtgaaagtcaagggaagccgggtgcggtggcttatgcctgtaatcccagcactttgggaggctgaggcagacagatcacccgaggtccggagttcaagaccagcctggccaacatggtgaaaccccatctctactaaaaaatacaaaaaatagcccagcatggtggcatgtgcctgtagtcccagctactctggtggctgaggcacgagaatcgcttgaacctgggaagtggaggttgcagtgagtcgagattgtgccactgcactccagcctgggtgacagagcaagactcagctcaattaaaaaagaaaaaaagtcaagggagatgccccagtcaaagataactctgccaacagacactggagtcatagttaggattatttacagaaagaaaatcatggagctaaaacttcaacacttcaaaacctatgttatgatcatgttgaaatgccccacgttgcctttattaactagtgctcagtctcccaactgaaaactcattgtaagaattgaatttgccatctaaccgggcatcctaccttgaatggttaaaaatcagatttgtctgatttctaattttagaaggaaccaggctgaccttcattccgctgttgctaactggagccctgttacctgggtgactagatttacaatatgtcagtatgcaaataccatctgcccaagaggagaaaggaagcaaggccttcttcctctaggggttgtcagcagttctggaaacgtcttcctctgggaatggggaggaaggcatgcccaatagaaggagaacagggaagaagatgtgctgattcgtttctggagcctctcccttgttctcttcccacagaggagtttgtggtctgccttgtggacagtcctgaatgtatatcattaggatatagacaggaacttagattgtacatttctcctggtagagtgagcaaaagaagtagtatatatcacttcagtggatcacaaaacacttagattcagataactggaatggcttaatgaagactatgaatatgcgattcctgcctccccaaatgccattaggaatctaatttccaactgataagagagtgtgggctgggcgtggagccggctgcctttactggacgaactctgaaggaggatgaagagaagtggatattccggctcattttcctacacttgaggttgactgggcaagcggaagggatttttctcccacagaatatctatattcagcacttgtcctgagtattgtttcaggcgagggcttggaatcacatttggaaacattcaaatccaaaggcagggacgttctgctttccttttcatgaaataactgtcacatcagctgtcagctgcaggaatctctcccacccacgcattttgtgagtccaaattaggtggactaattaattgtaatttttactttcaagtctcaaggactttgatgggcggctgtgcttcctttcatggttgtgtgcaggaatttatgtaggaggaagaccttctaggagcaggattgaggatctcaggctcttggcttctgattttgtacccctgggttacttcccctgtgacctctcctctctttgctctccttggctctgctctctcatctctttggtaaaaaagaactcttcttaccatcaacctgaaactgtcagcaacatgcaggagtgagcagtcactaaacttaactgtgacattttcatccacctagcctttttatctgcatgtcaaacaagtggccaaggagattaatgcctgagtgcatgctgcagctagacgggctgggttcaagtcccagctctactacttactacctgggtgacattgggcaagtgacttaacctctgtgtatcagtttcctcatttgtcaaatagggatttaaaacgctaccttcctcattgtgttgttgtgaggattaaatagtataaatattttagaactgtgctgaacctatagaagccagggctctgtatggcagcttttaagatgactctgtcatgcatctgcaggggtcctagtgaggtagtggagttttgctgtgagcaagtagatttccagagcttgtttgcaggcagtgacctccccgttctttcttgccatgctagtttcttttttgagatggagtctagctcagtcgcccaggctggagtgcagtagcgccatcttcactgcaatcacctcccaggttcaagcgattctcccgcctcagcctcccaagtagctgagattacaggcgcccgccaccacgcctggttaatttttgtatttttagtagagatggggtttttgccatgttggccaggctggtctcaaactcctgacctcaggtgatctgtctgccaaagcgctgagattacaggcataagccaccacgcccagccatgctagtttctattcatgcacagatcaagcctaattttccatgtggcaccccccaccaacaacagtaccccatgctgctctgttcctaaccccttgcaccctttctgtcaatgctgtgtaattagcacatttggacatgatgtcttagcttctcactctgattgtaatgtgaagttcagctcttcgttgtccttgaggcataatgaaaagatgccatgtggctggagagctgcctgcgatcgttgttcaatggatgatgtggccaagtacataaaacagtgacttggacaaccacacttgtcctttagcttactcttgaagtcacttattgctttcttattgcttatggctttcttgttgctttcttattgcttatggctttcttgttgctgtacataacttaaaactatcaaaagaaaatatgagatgttgcagctgctatggaggaaagtctgacagttcctcaaatggtcaaacatgttgttaccatgtgacccagtaattccacatccaagggaaatgaaaacatacgtcctcaaaagactcacacacaaatactcatagcagcattattcataatagccacaaggtggaaaccacccaaatgtccatcaactgatgaagggataaacaaaatgtggtatatccatacaatggaatattattcagtaataaaaaggaagtactgatgcatgctaaacatgaatgaatcttaaaaacatgttaaatgaaaggagtcagtgacaaaaggccatgtattgtatgattccattgatatgaatgttcagaatggccacatccatagaaacagaaggtaacttagtggttgctgggactgggaggagaagagaatcagggatgactattagtgggtatggagtttcttttggagatgatgaaaatgtggaattggatagcggtgatgatttcacaaccttgcgaatatactaaaagccaccgaattgcatatttttttaaaaaaagtatgggaaacatctatatgctcaactacagagcttaaagtcatctttaagattactttttccagcgtagctgtcacctaaaatagaataaaaagtgacttgatctgcaaggaaaacatgaaaaatgcaaatggtcaagaatggctttttcaccccaaattgttgaatataaattatatacatgcaattcgtaagtaaacgctgtaggactcggctgccttctatgttgtgattctgtaatttgctacattcctggatgggccatcaaaataatactgaaaacagcttctataacaaatagaagtgctgtttcaggtcatgcctaccaccactcctgggttccctaaggtactaattcatagctacctctttgtggtgcccttacaaagagtgatttaactgtttgtaaaggtgtctggacctttttgacattaaagagatttactgaattaaacttatgtttgcaaacagaatatttccaggggatgccttccagccccctaagaattaaccatcttagtttatcagtgtttaatcaggaccctactgattgactcttctggtttaaataaataatggggttgaaatctctaccagggctgtttcagtacttatttggaagaaggatgtgaaatacccaagctccacctaaaataggctttgcaagaataagtgatccaagagagaacctacagttgactttaaaacatcctgtaatcatgtcacacctgttaggatggtggttatcaaaaaaacaaacaaacaaacaaaaaaaggaaaatgatgggccagccatggtggctcacacctgtaatcccaatactttgggaggctgaggcaggaggatcagttgagactagcctgggcaacattgcaagacccatctctacaattttttaaattacccaggcatagtgccgtgtgcctgtagtcccggctactccagatgctgaagtgggaggatcacttgagcccaggagtttgaggctgcagtgagctatttcacaccactgcactgtagcctgggtgacagagcaagaccctttccctaaaagtatttttaaatgtaaaacaagtgttggtggagatgtggagaaatcagagccctcctgcattgctggtagggatgtaaaactgtggaaaacagtttggtggttactcaaaaagttcaacatagaattaccaaatgattgagcaattccacttctaggtctgtactcaaagtaattaaaagcagagactcagattcttgtatactcatgttcacagcagcattctgtttttttttttttttttttttgagatgatgtcttgctctgtttcccaggctggagtgcagtggcacgatctcagctcgctgcaacttccgcctcctgggttcaagcaattctcctccttcagcctcccaagtagctgggactacaggcgtgcaccaccacacctggctaatttttgtatttttagtagagatggggtttcaccatgttggccaggctgttctcgaactcctgacctcaagtaatcctcttgccttggcctcccaaagtgctgggattacagatgtgagacaccatgcccaggcagaagatagattttttttaaatgtagcaatttctggaaatataccaaacttactgttttccctgtcttcactgacgacctcaggagagcaggagttgacacccatttgctttcctcaatctgctatctgcttctttttaccaaggaggaaacactcttaggccaactatggcctaagaatgaatggtgcctccctgcaaccagccatacaccctctctggctacaagtgccatccatgcctctggaacctggagcttctcctaagtagggtgagcaaagatgctggaactttccaagtctcaatctacatatacaatccacatatataaccctctcccagccttgctaggtagttaccagaaccccaaaaccacttgccaagccagtcagcatttaggtaagcaaaggagtccagtgaccctcaaatatcactgagatcttgtttgtctaggcatgaagtgccttgaataactctttcaagacattaagaactcccgctgttcaattgtacctgaagcagcaagtgcttctctttgcatttcctttaccctctgttctcagaaggtctcaaagatgctgaaactaattgctgtcattcctgaaagatttctgcttttaagtggtactgcggcttcccttgatgctaccagccgttttcattaaggatttcatgaagggttgatgggtgcattaggcttcacaaacaacggttcttttcatcctggaaaggccttgctaccttggtagtggatggacctctctgctgcgaacatctctgtttatggggctaaggttacagagatgacaaagaggtcacaagcggatggcgcaggatatgtgtcctgggaaagctctatcttgattttccctctttttggtcttgtgattgactgtgggtttatgttctgtagtaaacacaagagccttgattgcttactaaaggtcagacttgtcagcaaacctctccattaacttgagttgcgatcggtttcacatttcctggcaaatcgtttgagagctctgatgaatgcatcagtttccttcagtcttctgtctgcaaggcagaaacgctcaagaaatccccctctttgccagacaccaagtgtatcttgtttgcagctctgcctctagcatctacagggcttggcatacacgtgaaatgcatgttgagtgatgaacgggagcgcacaggactcttaagaaccgagaccgtccccacagccaacgtatgaagaaatcccatgttctgcttctagagccaactgcccttgtggtttcgagttgagttctggcagttcctgtctttgctctcttaatcattcttcatgggctcccactaatggctaatttgctcagcttgtcatttataaatacaaggacatgacacccactgccttagccagtgcttataaagtaacctgtaagtgctgcatgttatcatctcggcttttcaatttatgagtcaagtgaattctcggggctagaacatcacccctaaaagcgagtcagtgttggaagaagcagcaaaaatatacatgcactcttacttgcatagactatgaagactattgttactctcctgtactcagtcaagtagattatgctcctccatggtcaagtacccttgaggcgatttgcacagttttgcagcaacagcagggatagaggttgtgctggtaccagcaggaagcatagcctgagcccttcccttggatttcagttgctctatttctattcagttcagtccagaacttaggacaggttaagcatcagcgtccaatacagtttatattagtttgtcacaaaagggggattttttgaattaaatgttgataacccagcttcttaaatctttttatcagttttttcattcccataccctggcataatgacacaggtattacgtaaacaagacacctccgagggctgcttataaaaactcaagagaaaagataaatatgtgatgatgcactgatatcctgaaatatgagctgcaggtttgtattttctttgtgggatcggatattggttttcatggtttattgaccaggctgagagacatctgacaaaacacccaagaactttacaccttttttttttgttattattttttaaccttcctgtctacatggagaaatctacacattgaatcacagggcctggaagactggggcttagccagtcatgttcttagcttgggcagaacccaaatcagatccagctgttggaggtaaaaatacacgctgctttcccaaggaaaaagcaattggaattggtctcactgtagagttactctcgggcagaacttcgggataaggagcaactggagacggtcgactgtgaatgtgatgttcatgtgacattcatgttcattgaggaatgtgttctcattgagaccggatcagaactcatttgggttcagttaatgactctttcctttctgccgggtctttgtctgcaacattgggcacgcagtcagtacctcgttgtgtgggagcatcaccgacaggaatcctccagaatggtcatatattaaagacctctcgggctgggcatggtgattcatgcctgtaatcccagtactttggaaggccgaggcaggtgcatcacctgaggtcaggagttcaagaccagcctggccaacatggtgaaaccctgtctctactaaaaatacaaaaattagccgggcgtggtggcacacgcttgtaattccagctactcaggaggttgaagcagaggaattgcttgaacccaggaggtggagattgcagtgcgccgagatcacaccactgcattccagcctgggagagagagtgaaactccatcccccaccaccaaaaaaaaaagacatctaggcttagggcacggcaaacaaagaactcccctggcatggcaggaatcagggaatctcatgtaacattcattgtttctccggggagtcttttcatatttctcccgtcttctaggctcaatacctttcaggaagcttctaaaccaaagattcatcaaatagaaataattttaaaaattatttcataataaactttaataattttttcataatcataaagtaattgttagatggtttccttgaggcatgagccatactcactgaaaaatgacaagttctgagcctttttaattgtgatcaaatatacatatcataaaatttaccattttaatctttttttttttttttttttggaaaatgaggtctcacttgcttgcccaggctggagcacagtggtatgatcatagctcactgcattgcaccctggacctcctgggctcaagcgatcatcccgcctcagcctcccgagtagctgggactacaggcgtgtgccaccatgcccagctgagtttttatttttttgttttttgtagagacaccatctccctatgttgtccagggtggtcaccaactcttgggctcaagctgtcctcccacctcagcctcccaaagcactgggattacaggcatagactaccatgcctggcccactgtaaccaattttaagtgtatatttcagtgacattcagtacattcacattgttgcaaaaccatcatcaccatctacctccagaagcttttttaccatcctaaactgaaacgctgtaccctaaacactccattacccactctttccagtccctggcagctaccattcgactttctgtctctacgaacttgacacttctagctgcctcgtctaagtggaaattctcaagctttttataatacttatgggaagtagtcaatctgactactgtctaatgaaatttttacataaggaaaagatagttttgagcagatggtcagatttcctttggttttggcattgtacaagtatatggcagatgcctcattctcttatactttctggaacccgcagcataacagggatatgaatgaaacagatctgcaagtcacagtcagacatgtggccaactagaaggagcagtggtgagggcagttggtgtacaggtttattatacaatttatgaagcattttaatttttaagttttttttttttctcacttgattctcaccatgtcttgcgaggtattctattagttccattttaatgataataaactgtggctcagagaagtaaattgtctaaggttacaaagctagtcaatggtagaatcaggacgctggcttcacattttcatttttaaaaccccagtgctttccatcacagcccactgtgaacaattatcacgtctctggaggcccaggtaatagccagtcctcaggaagggagggcctctccaaatgcaaccctaattactagtgctccacctcaccagctcagaaatacatggaaacccttttttttttttttttttttttttaattgagacagagtctctgtcaccaggctggagcacagtggtgcaatctctgctcactgcaacctccgcctcccgggttcaggtgattctcctgcctcagcctcctgagtacctgggattacaggtgcctgccaccacgcccggctaatttttgtatttttagtagagatggggtttcaccatcttggccaggctagtcttgaactcctgacctcgtgatccaccctcctcggcctcccaaagtgctgggattgcaggcgtgagccactgcgcccagcctaaattttctaatagccacattttaaaaagtgtgtagaaagaaacacataggctggctcatggtagtttacacctataatcccaaaactttgtgaggctgtggcgggaggatggcttgaggctaggaatttgaggccagcctgggcaacatagcaagataccatctctacagaaaaaatacaaaacttagctggacgtggtggtgcctgcctgtagtcccagtgactcaagaggctgaggtggaaggatcgcttgagcactgggggtcaaggctgcaatgagctacggtcatacctctgcactccagcctggatgacagagcgagaccctgtctctaaaaaaataagaaagaaaaggaaaaaaaaaggcaagtgaagttaattttaaaaatatattttagttaacccagtatacaaaaatatcatttcaatcaacataaaaattattaatgaactattttgcttttttttgtagtaagtcttccaaatctagtgtgcattttagacttaaacagcactcccaagtcagacgctaaattttcattggcagtacttgatctttatttagatttcataaaattcccagttgaaaaagtagattcacatacccaaagtgtttcaaacatatatgaaggttttctaataactgagtcaagcaccagtcttaaatttaaatgaattaaaatgaaagaaaatttaaaattcaatccctctattccatgggccacacttcaaaggctcagtggccacacatagcaaatagctttggtcctgggcagaacagatctagatgaacagctgagggtggcccagactggacccagccgtggaatagaacaacggtctgcaaacttatttctataaagggccagataataaatattttcagccttgggggttacacagtctctcaaagtattcaactctgccattgtaaatgaaagcagccatagaatgaatgagcatcgctgtgttccaataaaactttatttacaaagcaggcatcagcctgcatgctttgccaaccattagactagaacatttgtcctagggccttagctgtgctgtgggattaccagaaaaagagacagctctcacctctagctttctgagatgaggttgtcaaaatctggactcactggatctcctttcctgtgtgtaattagaattttgacaccacttggcatgaagcaacggtgggccagagttctgcgtcatttatccttcaggtgctctctgcagtggatggtttgtgcctcctgaagcaattgcttccctgtgctttgaggtccagcagaggtaacagcggagaaagctggaagaaaggcttcaacaaaagcattaatggtgatgtgaagaatgcaggaaactcccaagaaagccaaatgatatcactctctgcttttccaacatagccagtgtgaggcaggaatcacacacgtttcacagctgggtaaatatgtgatttcacgtgaaatcagagggacaggtgtttctctgtgcttgttaggtgatatggcgtccgcccattttgatggtaaaggccaaagtaaatataaattctgtttcctgacctggggccttgaggtccccaggcggggattaccaccacccaatttgggaatctacgttgcaaagccatggttcccgctgttcacattgtgatgtttggaaatggtattgggactaatggagggaaagaaagaggacaggaagggagggcatagagattggttggtaggaagatgacccccactaggtgctttagggtagggggttatggaggctggctttgcagaaactctgggacgcagcagttggggaagggtgaagtgaaaatcagtgatagcttagagctctgctgaccctagaactttggatccagtatttcttcaggcatggatgatgttgaaggtattgttggcactcatttgataatcccttactgtactcagaagttttggcttggggttgcctttttaattcaaggttcaagattaaatgacttggctgggtgtggtggctcatgcctataatcccagcactttgggaggctgaggcgggaggatcacctgaggtcaggagttcgagatcagcctggccaacctggtgaaaccccgtttctactaaaaaaataacaaaacttagccaggcatggtggtgtgtgcctgtaatcccagctacttgggaggctgaggcaggagaattccttgaacctggggggcagaggttgcagtgagccaagattgcaccattgcactccacctgggcgacagagagcgagactccatctcaaaaaaaaaaaaaaagttaaatgactggatggtgccccatgtaagagtttgcaaaagttcaaactagtgaaactgctgagcttcttcagtacattatgcaactctgccttgcctccaattttgcagctctatcaagtgtacagcgtggtgtgtggggaaagatctgcatcccatgatgtttttgactatggaggtaattatttggagtagctgttctgatgataactcacggaggttcagtctgcagcatggaactgtctctagtcatgattgcctgtaatgatgattacccaaactctggaattataacaatagattttacaaagttagagcataattgctccaccattccttacatgtgcacagattaaacaactttgatctttcaatcagatttttgttactcatcttctgcaatagcaaaggtcagaggcagtagctttctgccacctccctcccctctttttaaatcatcacgaggccagatttttaaagcatttaacttggtaaagaaataagggctgaagttgtgtggactagaatgagtacaggcctgtggggggtcagaatcccaattctgacatctagaaactctgtaacatacagtcttcaacctgtctgcaactcagcttcctcgtctgtcaatactcacttgtctgaatcattgagagattagaatgaacataggcggccgggtgtaatggcttatgcctgtaatcccagcactttgggaggccgaggcggatggatcatgaggtcaggagttcgagaccagcctggccaacatggcgaaaccccgtctctactaaaaatacaaaaattagctgggtgtggtggtgggcgcctgtaacctcagctactgaggaggctgagcagagaatttcttaaacccaggaggtggaggttgcagtgagctgatatctcgccactgcactccagcctgggagacagagcgagactccatctcaaaaacaaaaaaaaggaatataggctgggtgcagtggctcacgcctgtaatcccagcactttaggaggccaaagtgggagaattgcttaaggccaggagttggagactaacataatgagaccatgtctgtacaaaagtaaaaaaataaaaattaactgggtgtggtggcacacttctgtagtcccagctactcaaggggctgaggcaggaggattgcttgagcccaggaagtcgaggctgaggtgagccatgatcatgccactgaactctagcctgggtgacagagtaagaccctgctgcttttaattttttaaattatttattttatttacttagtttgtttttgtttttgtttttttgagacaaaggctccctctgtagcccaggctggagtgcagtggcgtgatgtcggctcactgcaacctccacttcctgggtttaagtgattctcctgtctctgcctcccgattagctgggattacaggcgtgcaccaccacatccggctaatttttgtatttttagtagagacggggttttgccatgttggccaggctggtcttgaacccctgacctcaggtgatccgcctgcctcggcctcccaaagtgctggaattacaggcatgagccgctgcgcccagccagaccctgtctcttttaaaagaaaggcaaaagaaatataaagcacttaatcagtgccttgcactaatgggcaatcaataaagtgatgctgtatcatcatcatcaattctacgatcaattctcaggctttggaggctttagaatctttctatgtctttggatgttgtggcctttattcaacatacaagtttgtttggagctggtggtcagggatatggtattttcactaagttagggatggagctttgtaagaaatcagtataaaggaggaaaaaagaaacaagcgtcctaaagacagaacatttacagctgagcaagtgctgatggctgccttcaccacgttctgctgcagcggttctcagcatttatgtgcatttctgaaagattcccactcttttctccccagagtctgaatggagaaggtctggaacaacctgagattcagcatttttaggagtgtctctggagattttgaaacacgtggttcaaggactctctgtctcttctccctcccccaaacgagaaactgctgcttgtgtctgagagtcaatacgagatttaaaaacagcaacaaaaccactgctcctggaatggcccagttcccatggccacgaccagcaaagtgggcctgatttccttaggaggggaagaagtgacggctgcagagcccttgaccatctcggtgtctgggctcgagtgtcccgccacccccagcgtctgcaggtcacccccacactgacgccgtctcagtgagctaatgccagtgtctgccccgcgccggctcattcagcagccactggaatgatcaatgaggccggccgcccagccctccaccggctgttggtgaatcagctgcctcggccattcccatctccactgagcaggaagcactcgagctgagcccagccagggctgactggcgtctggctaatggcttttctgtgtcatgcactgaccttgatcccatatgtttttcatacgtgagtgggttggagtgcctgaagatggtccagtggtggaaatagctcttctgccaagccccttaccgaggtcctgggcagtactttggtttagaggtgtctgcttctgaagcaggatcggtgcttttgtttaaattgaggtgaaattcacataacataaaatcaaccaggttaaagggaacaatcagtggcatctagtgcattctcaacgttgtgcaaaaccacctctatccaaaaacacttccatcgctccagaaggaacccctgcacctgttgcatgagttgactagggctgctgtaacaaagtgccacaaactgggtggcttcaacaacagaaatttggggccaggagcaagtggctcatgcctgtaatcccagcactttgggaggctgaggtgggtggatcatttgaggtcaggagttcaagaccagcctggccaacatggtgaaaccccgtctctactaaaaatataaaaattagtcgggtcgtagcggcgtgcgcctgtaatcccagctgcttgggaggctgaggcaggagaatcacttgagcctggtaggcggaggttgtggtgagccaagatcgcaccactgcactccagtctgggcgacagaatgataccctgtctcaaaacaaacaaacaaacagaaatttactgtctcacaattctggaggctagaagtttgaaatcaaagtgtcagcaggcttggttccttctggaggctgtggggtgagggaaggatccggttcggacctcaacccttggcttttttttttttttttttttttttgagatggggtctcgctctgtcatccagactagagagcagtggtgtgatctctgctcactgcaagctccgcctcctgggttcacgccattctcctgcctcagacttccaagtagctggaccacaggcacccgccaccacacctggctaatttttttgtattttcagtagaggtggggattcaccgtgatcgccaggatggtctctatctcctgaccttgtgatctgcccacctcagcctcccaaagtgctgggattgcaggcgtgagccactgtgcctgaccaacccttggctttatagatggccatttttctctccacatcatcttcctctatgcctgcctgtgtccctgtctaagtttccctttattataaggacaccaggcattttggataagggcctaccctaatgacctcattgtaacatgattacttctgtaaagaccctatctccaaataaggtcacattctgggttactaggggtcaggacttcacagtatgtattttgcggggacacaattcaacctttaacaacattaggcagtatcagtactttgttccattctatggctgaataatatcccattgcatgtaaacatttattttttgagccccaagtacaaagcaactgtcagtgaaatctccaccccctgggtagtgtgtgcccatctgtataaggtggcatattgatctcacaggtagagctcacaaatctgcaatgtgtaaactttttcttattgtcttcctccttgaaagagtgttagcctttacgagcaaaagtcaaagcagtactggactaagggaagagaagtcaagcttctgatcctaaaattaattttaaaaattgatttcaggctgggcactgtggctcatgcctgtaatcccagcactttgagaggctgaaatgggcaaattgcttgagcccaggagttcaagaccagcctgggcaacatggtgagaccctgtctctacaaaaaatacaaaaattagctgggcgtggtggtgcgcacctgtagtcccagctgctcaagaggctgaagtgggaggattgcttgagcctgggaggcggaggttgcaatgatctgagatcacaccactgtagtcccgcccgtgtgacagagtgagaccctgtctcaaacaaacaaaaaaaagaggatttcatctttaaattttatttttccttttcctggtcttatccccagtgctgcccacttcctgcaagcacaggtgcacacacacaggtacgtgcacacatacgctcacgttaaaagcgttttcatgtgaccgttctggagaggggcgtggcacagataggagacacagtccttcgagaagacccagacggcagcttgcttccattgtcatggttactgggctcggtccccagggctggctgcagaccagagcctttcagagcttcttcacactcccgtccctgctcctgcctcagaatgaaagagaaaccttcgggcacatgtgtcttctcagctgtgaaactaactgcactgttgacttgtgcatttcatctgcccccttaatttaaaatctatttctgtctcttatgcagacagacaggggacccgcatccctgcagattgttggggaataaccccgagtcctcattagtttgttgcagactcaggccccactcccccatcccagaggcgtcggtggtaatgacccagggtctgtctctaggaaggatggcagcagggtcgcatcgtcctgcgtcctgactctgagcaaggttgtacctcatgcaaaagttgtttaatttcctccttcctctctccccctcccctctctcttttccatcaaattcgttttgccacttcgaaagtccactgggggaagaaatgcctgctggtcccagggttttcagagaggcaggaaggcagatggaacagctcatacatgaaaaaaggacagaaaatgttcatatagtatgttgctccacatgattattttagggtaagacaggtgacttttgggtccttggactggaaggctccacactcttcatggaattggatgaaaaggagttaaaagtactgtaggtggtcctcggagaggagcggccttcaggggctcagattatgagccttggctccactcatgggggagccggggcctctggagctttgaaaagctttcaggtgattctaatatccagccacctttgagaaccattgttctaggggacagaggcctccaggagagttgagcattttgagagagggaggatagaagaaatagatgatatctaatgctccctgttcagcaattttgctaattaggcagaaagcaggggcagaaatcacacaccctcggctgtcttgggccaaaccaagcaggactttagctccatttaaccctgtagaatgcaaagggagactccagtgtcccccttcccaaggtttggtcggctgccaaagcttacagactgccagccacccggccgagcatttgccaaggtgatgtaaaatattcacgggaacacgccgtctcgatgttctactcacaactggttctctccctagctcccgaggaaaagtaacatgaggcccatgtggctgctttctcttctcagcagaaggtgctgatgttattagtggcttgccaagctatggttggagggggatgtcaggggcacgctgtggggctgacctttctgtctctgactctgttttgtagtacaaaattggacagctgtacatgatcagcaaacacagccatgaacagagtgaccggggagaaggggtggaggtcgtccagaatgagccctttgaggaccctcaccatggcaatgggcagttcaccgagaagcgggtgtatctcaacaggtgagtcatggcagcctgcgttctgcacagaagccccctcccacctgaccccatggtgtgacagtggaggcagtgggtgtctgggatgaaaaggtcacttggaaagtaactacgtccaccgtctacgaccaccaatctcattgtttttgaaaacagaatctgcccgagcgaggtggctcatgcctgtaatcccaatgtttttaggaggccaaggtgggaggatggcttgaggccaggagtttgaggctacagtgagctatactcacagtactgcactccagcctggggtgacagagcaagaccctgactgtaaaaaatattactacataaaataaaataaacgaaatgaatctccccctccccaccttgcattctgcaaaatcgtcctcaactgcgtttccattaagaggagctttcggctcatctttcccacggctttgatgacgtgttacagcgaaatgtgatcttaagaattcaagagcctggaaggtggaggctgcagtgagccatgatcatgccactgctctccagcctggccaacagagtgaggcccttcttgaaaaaaagagaattaaaggactttgtctcatcccttggttcagtgttagctgtaggaaagagacggtgctgcctatatgctgtggacaagtaagtgctggaggtggcaatgcaccttttggtctcagtaagattttcatttactactggtgaccacttgggtgtccgaaaagggaatgacaaaacaaacagtcacctgtgaccaaagtggttaagatggcttccacttctcaagtggacccatccttcccaaggtggaggttgtcactctccttttggaagggaaacacatcaaggatgacaaaatagcactagtcaagcgtgccgtttctgctttgcaaaatatattctttaatctcttgcttttttctttttcttttcttttctttctttttttgttttttttaaagacagagtctcactctattgcccagacgggagtgtaatggcatgatctctgctcactgcaacctccgcctcctgggttcaagtgatactcctgcttcagcctcccgagtagctgggattacaggtatctaccaccactcctggctaatttttgtatttttagtagagacgggattccaccatgttggccaggctgatcttgaactcctgacctcaagtgatctgcctgcctcagcctctcaaagtgctgggattacgggcatgagccaccacacccggcctttcttgctattttcttactatgaatggcgtaatggattattagggcttgtctgatcttctccccatcctatactcctatccagcccatttcttcctttcagttcctttctgaaaccttcggaatatttgtggttagatgccatatgaaatatatcttattggcaaagtgtggtggctcacacctataatcccagcactttgggaggctgaaggtggtagatcactttaggtcaggagttcaaaaccagcctgggtaacatggcgaaaccccatctctactaaaaatgcaaaaattagctgggcatggtggtgcgcacctacagccccagctacttggaaggctgaggtgggaggatcgcttgagcctgggaggttgagggctgcagtgagctgagatcatgccactgtactccagcttgggtgacacagtgagaccttgtctcaaaaaaaaagaaaagaaaagaaaagaaaagaataaagaaaaaaaagaaatatattttattgaaattaactgtccattccagcaaacaagtcttacgtcagccatttcatgaatacttttacccctacctgtggcctctccgattggcccatatgtgattatccagaaagtatttccaacaccctagctgggcagtgccccagtttattcactgacaccagtgactgtccattctcagggcctcggacgtggttagacatctctgagaggaaccatatttagattcccattctcgccttgaccccactccccagcagcttgaattggactattccttcttgatgggagactttgcttcctgtcactagggtggatggaattctcccagacccgtgtcctgacagtgaagggcatgagctgattaaactgatgttttaatttgcccagagatgcagtaccagggaattcctgagtcatgatgaaatgcaaatgagattgatcccattcatctattagtagctgtgaattcccaggctttggaaccagttcagtgtccagccagctgttgatttgcaggggcagctgagctctgggtctgtcctgagcatggcttttttacagagacaggtttctcaacatgctgctttggcattcttagcgtggagggtgtaaatcaaatactgagcaagtttctcctcggggatcacctctgcagggcaaagagaagtgaggaagatgccagaaaatagaaacctatggaaaattccatttcttggcatacaattgcattctctcaagttattacctggagaatgttccttatatatgaaaatcaggaagaattttaggaactttgtaagttttgctgaaacacaataagaggcatccagctctccctgtcatgtctgttttgtcatatcatatttatatcatatttatttaaaagaagagtaataaacattagtaagagggaaatttgttataaatagatgtggacttccagtaatagtaaggaaaaagattaatggggaccctccaccacttcccatgacaaacacaggatgaaatataactatgtaaagaagctgagctcaaaacaaagaaagggaaatcctccgaggctagaaataaacaggcaaactgaaaccagagtggaaagcagacccgttaatgctaaggaagggcatgggggggacatcagaacagagtgtgggttctgacatctagggactgggcatgtcatgcccatggggaacaggaattagggcctcaggcccacataaatggaaagttggaactgagaataggatataaaaataatttttgacaatcaaggtctgagagagtttactaactctgagactcatattgaaagaactactaaaggatgtgctgtaagaaagaggaaactgagcccaggaaggagagggagttctagaagtaataataatgaagaaattgataaacaactaggtaaatctttgaatggatgtaggatgttttaaaaacagtaataataagacaacaatcaataacacagaagatgggagggtaataattacagtaaaaagcactttaaggtgctaatattgtttaggaattagaaaaaaatattgattaattttagattttctgtttttctttttttgagacagccagctccgtcacccaggctggagtgcagtggtgcaatctcgtgccttagcctcccgagtagctgggactacaagtgtgcaccaccacaatgcccgactaatttttgtatttttagtagagacagagtttcaccatgttggccaggctggtcttgaactcctgacctcaaatgatccaccagcctcggcctcccaaagtgccgggattacaggcatgagccaccgtgcccagcctaattttagattttctaagacaagtatgcatattcaaaatataaaggtaatctctgaagaggtggtaaaacaatccataacctccaagagaaaacttgatcaatccacagagggcctgggaacacaaaagagaagcctacaaaaagcatgataaatagaaaacacaaatttggatggtaaaataaaatgaaatgtcagatactcacttttctagccaccctcgcagctagagatggccatgtggacctagttctggccaatgagacatgagatttttcctccttgataaaaagagggacgttcaaggagctatctatgctattcaaagagaatctgttctgatgtctccccacttcatgatttgtgtgtaagaaagtggggaggatgggggctgactgctggaaggaacactaatagtgcctaccaagtgaaccttgataacaacactggataataaccataccaaaaagacacttataggccaatctcagttgagaacatagacatgaaaatactatataaaacattagcgaataaaatacctcagagaaaaatgtatcatgacctaatcagatttacccctgaaattgatgaaattaacatttaataaatctgtgtacttattcagagtaaagtcaggaacacattaaggatgcttgttattaccatgtctatccaacattatgtaaaggcctagccaatgcaataaaacaagagagaaataaagaggaaaggaagaaacaaaatgatcatttgcagataatatgattgtctgatagaaatttcagacatttctacagctgttaacatcaatatgagaattcagcaagattgttgggtacaatccatatagaaaaatccacagcattattatacagcaggaaaaataatagcgaaaatataatttaaaaaattttttgtttataatagaaaaagaaacaaagttacccagtaatcagtctataagatatacaaaatcattttggagaaaaacataaaacatttgtggaagacgttttaaaagccctagacaaatagtgaaacataccatattcatggacgggaaatgttacaaagttggcatcaaatctcaaatcaatctataaatttaataaaaatctaacttaaaatgccaacatgttgttttttaaaaaatagaactggtgctgggtgcagtggctcacctctataatcctagttctttgggaggtcgaggtgggcgatcatgaggtcaggagattgagaccatcctggctaatatggtggaaccccgtctctactaaaaatacaaaaaattagccaggcatggtggcgggtgcctgtaatcccagctactctggaggctgaggcaggagaatcacttgaacccgctaggtggtggttgcagtgacccaagatcgcgccagtgcactccagcctgggcgactgagcgagactccatctcaaaaagaaaaaaaaaaaagaactggaggagatatttgtaaaattcatatgaacaatttggaaagttgaaggaggggcttgacctactagatatcattataaagctaattcagtaattacataagtaattaaggcagtggggtactagagcagagttaaactcatggaacaaagtagcccccagacagatccaagccattattagtgctttgtatttaatagagctggcataagaaattattgaggggaagatgaactcttcggtatatgatgttgagatgactgggcttctaattggaagaatgactagagccctccttcacactacacacacaaataaactccatggctgggcgtggtggctcatgcctgtaatcccaacaatttgagaggccaaggagggaggatcgattgagcctaggagttcaagaccagactgggcaacctgacgaaaccgcatctccacaaaaaatacaaaaattagccaggtgtggtggcacacagctgtggtcccagctgttcaggaggctgaagtgggaggattgtttgagccctagaggtggaggttgcaatgagccaagatcgtgccactgcactccagcctgggcaacagagcaagaccctgtctctaaataaataaataaatagatagataaattccagattgattaaaaacctaaatgtgaaaaaatcagaagaaaatatatgtaaatagctatattatttggagagtagactagaactaattaaataaaaaataaataaatggaatcattaatattacaacactaaaatgaagagcctttgcatagcaaaagacacacacataaaaagtaaaaaacaaaaacaaaaaaaacctttgcatagtgaaagacaccaaaattaaaagaaccatccctgcctggaggtaagtatttcaaaatgcacatatagaccaagaccaaggactagtatttaatttaaaaaaaaaagaaaaactcttatagatcctttttttttaatttgaaaaaaaagacaataatccaatcaaaagatgggcaaaggattgaacatgcaattcagaaaagaggaaatgagaatggctaatataaacatgaaaaaaattcccaccttattggaaaacacaaaataaaaaagcaatagcatcctcttttacacacatcagatagacaaaaattttaaaaatctgataatgccaggtgttcacaaagatatgtgaaaataactcacttccaatgctagtaagagatataaactgataccacctctttagagagcaatggacagcaactggaaaagttgaaaacatatatacattccacttaacaattatatttctaggtagagccctagaaaaattcttgcactgtacacaaggagacatttaccaggagattagtcctaatgctgtatgcaatagaaaagaaatggaagcgattcaagtatctgtgaatgggaatacattatggcacattcacgtaatggaaaattccacagcagttcaacttaatgaactagacatactttgataaatttcaaatgcacatcgtaacgtgcaatatatcagctgcaaaaaacaaaaacaagtcccggcacgatggctcacgcctgtaatcccagcactttgggaggccgaggcgggtggatcacgaggtcaggagatcgagaccatcctggctaacacggtgaaaccccgtctctactaaaaatattaaaaattggccgggcgtggtggcgggcacctggagtcccagctactcgggaggctgaggcaggagaatggcgtgaacccgggaggtggaggttgccgtgagccgagatcgcgccactgcactcgagcctgggtgacagaacgagacgccgtctcaaacaaacaaacaaacaaatgtatatatacacatatagtatgatgccatttatatctactattaagatatacaatatgcataatattactacatttatatatattgtttacagacaaccgcatatgtaataaaagcaccaaaacatggagaaaccaccctcaggttgtggttacctttgaggagggagaggaatgagttggcatgagaggaaactttacctgtatctactacattttattttattttattttattttattttattttatttattttttcgagatggagtcttgctctgtcacccaggctggagtgcagtggcatgatcttggctcattgcaatctctgccttccgggctcaagagatactcgtgcctcagcctcctgagtagctgggattacaggcacatgctcccacgcctggctaatttgtgtatgttttagtagagacggtgtttcaccatgttgggcaggctggtttctaactccttacctcaaatgatcctcccaccttggcctcccaaagtgctgggattacaggtgtgagccatcgcacctggcctattcctttttttaaaagaagaaagttcatcacaaatatggggaaatgttagtttgttaaatctgaatggtaatgttaaaattcagaagtgtacaccaacaatggtctattttactgtaatttaaaaataaaatcgaaaatataaattctgggtggcagatacatgcatgtctgttacctttctctcgattttttatatattttttatgtaagtgaaattctccacaattaaacataatattttaaaagtaaattaggtggagaaatgaaacctggttactgtcaaaactggatggattagtgactgattgaataacaaaaggtacagatgatggatagtggcaaccaagagagaaaattctatgtgtaacttaaaaataatgtgatttagtaatgtgactcagaagtctgaatttggtcctattggattttttaagccaacatctggctaaatatctagaagatatcctttccatacccttgagaaacccacagccaggaaggatgataactctaaaagactgagtgagggctggacgcaatggctcacacctgtaattcgagcactttgggaggctgaggcagatggatcacttgaggtcaggagttcgagaccagcctggccaacatggtgaaaccctgcctgctaaaaatgcaaaaattcgccaggagcggtgtcagacgcctgtaatcccagctactcgggaggctgagccgtgaaaatcacttgagcctgggaggcagatgttgcagagagccaagactgcaccactgcactccagcccgggtgacggagtcagactccatctcaaaaaataataataaaaataaaaataaataaaataaaagactgagtgaggatccagaaaaacttcagtagtttggaattacaggccattttctatcaagatgaaattaaataggggcaagtatatggtcttatctttggatcccaaaatacaaattatataagtatgggatgaaacactgataactttgcaatggcctgtttgaaagaaatacagtgggtttagttgacaattcaatatgaagcaattatacatacacacacacacacacacacacacaataatttagtgtgtgtgtaatagattatacagctgcaaaaattattcttcaactgaatcaataaaagtaacgtaaaatatctaaaaccatgtacttgataatcttgcccaattttccactagtcagaacatacttggaatatttttatctgttcctaaatggcacactttaaaatggatatagacaaactatatctagaaactcaagtgatagaaagaatgactgaagaaaccaaggatatttaacccggaaaagctagacttgagtgtatcatggtgccattagatggagaagactcagaactgtgtatgccacaagacctcacttagcaggaccaatgggaccaagaccagtgggtaggaatgccaggagaaagacttcggctcaggttaaggaagaaatttccaagcacacaaaccatctcagaatgccttatagtggattttgctattgctggaggtgtttcagcaagagtgagaccctgttcatcagggtgtcctgaagcagattcaaatatctaataggcggttgaacatattgggtggctggttaagttggacagcctggaagatccttttcaaccctaactttctacactcaaactatctatcagtcattgattgtcctgattctcctccagcatacatatgtaaccaatgaggcacaagaaaagaagtatttttagttatgcttgcaccattctaaaccaggtccaccatttcataattttaaaaagttcttgggcgtatttggtagagtatggatgcatattttggaaccagggagattatgagttagcaagagagaaagaaaaaaattgacagaatatgaattaattagataaatccccatcatcataaaagaaaaccaaatccattgtttaatcatcacaacctagagccacctcaaggtgactcaagtcctccatgcataagtcatgtgactgccttgtgggttgggctgcttcagagtcataattcattaaacgagtatttgctgaaatgtacgacgtacaacacattgtgcaggcattggagagaatcccttaagaaataagccatggtcatggttcttgcctcctgatcaaggtagggtccaaggcattttcataagtccacagggcagtgggtcctgattgttggaccggccgtaactaagatgttcccagtgcccatttaataatgtacacagacaattatcattgacctatggacctgaacgcatgagccggcatagtgagtggattctcttccttacatcaatctgtatgggaagtcaaaccacattcagaaactgccttattgattacctaaagtaattattagaggcactggaaatattcaaagcctgtgtaatcacagcctactctccagttaatgtggaaatgagaaagttgctcaaaggggagttagagtccacaataattattatcactaagcaaagatagtgtaaacatccatctatcgaccactggtgtgctttggctggtggttatgttgtctgtgggggatgagtggcagacaggccaaaaaggaggcgtgaggctttagcagttaaggtccacagttgccagcaagagaaactgagtctcttgagcagaaaggacatttcatggaaagatgttaggagccctcaggatcatctggaggcttaagagtgggcagaaatcaacagccccatgatgacagccatctttaagtagagccagatggcgtcattctgccctcatcaccccctacctctgctgcctgcagccatcagcaccgcagctgccctgagtagatctgaattgtcccgtttttctttccaccacttgttccaaaatcccaaacacaagtgtcccattgggttcccagaccaagccctgggctaccagtgaatgggagaaaggaactgctaaaccgttttccaaagtggctgcactgttttatattcccaccaggaatgcaatagggctccaatttctccacataatcactgacgcttgctattgttgtctttttgatgatagccatcctagtgggtgtgaagtggtatctcgctgtagttttcatttgcttttctctagtgactaatgttgaccgtctcttcatgtgttcattggccatttgtatatcttctttggagaaatgtctattcctttgccaattttttaattgggtccaatgtccgttgaaaatgccatttatccttttaatacatgcctctcatttcccagagattgtggggttgcttcatcttctggccccctcctacagcatctgacatactgttgatatatagtacattatgatggttgcctaatatatttggtatatgagtactaatgcattagtacatttacattagtactaatacaataatacattgggtaattaagagggaatctcgctctgtcacccaggcaggagtgcggtgctgtaatcttggctcactgcaacctccgcctcccaggttcaagcgattctcccgcctcagcctcctgagtagctgggattatagacacctgctaccacgccgggctaatttttgtgtttttagtagagacggggttttgccatgttggccaggctggtctcgaactcctgacctcaggtgatccgcccaccttggcctcccaaagtgctgggattacaggcatgagccaccacacccggcgtgtgcttgggcttttgatccagttcagttaaccaagtaagtagtatgccttgacacgtcttcaaaaatcctggttacaactggcatccaaggaatgggggcatgatactaatcaaattctagaatagtgattctaaataaaacctgtcacccagaaacatatgaaggtggacttttcttttgtcaccttttcttttcacttcgtcgctagcatctctcggatcccttcccactgaagcccaggaggggagggaatgggggtgggggtggaggggcactggagaaaagatggaggctatttttaggcttgtttttcaaccatgaagtgtcatgttcttcaccaccctggctgctggattaattaggctgtgctggcagctgccagtcagggagggttgccagcttctaacggtgattccgcctaatgcctgaattgattttcagggagagaacatttttcccgctacatggcccttgccttccacggcaatgtctcctggcctctgatggctttgggtaggagaggataaagctttcataagtcatgaactcttttttaactgatgggcttgcaaagctaccagctggtccttttacctaacagcttgttgatagaaccttgtggtcatggcttgggtctctctttcccatttctgcttcctgttctcccagatcttccccaaaataagctcagtgcccagaacttgtgtggctttgggatattccactgcccgggcaacaggcaatagagacagcatcagagacatagactctgaccaaatagctcattttcatgctatttttccaagaatctctatggtgattgttaacttctagatatacaaagacaatatttagtcattaaaaaaatacttattgaggccgggtgtggtggttcacgcctgtaatcccagcactttgggaggctgaggcaggaggatcccttgaggccaggagttcgagacaagcctgggcaacatagtgggactctgtctctacaaaaactttaagatataggcaggcgtggtagcacactcttgtagtcctagctactcaggaggctgaggcaggaggactgcttgagcccaagggttcagggttgcagtgagctatgatggcaccgctgcactccagcctgggtgacaaagtgagaccctgcttctaaaatatgggtctcccagcactttgggaggccgagcaggcagatcacttgaggtcaggcgtttgagaccagcctggccaacaaggtgaaaccctagctctactaaaaatacaaaaattaaccaggtgtggtggcatgcctgtagtcccagctactctggaggctgaggcatgagaattgcttgaacccaggaggtggaggttgcagcgagctgagattgcatcactgcattccagcctgggtgacagagcaagactctgtctcaaaataaataacataaaatatgggtctctctatccatttattcatttatttttatttttttaccaaaatatataagctgctgcccatgctatgtttgaaagatggctccttatctagtaatagctggtcaagttacttgactatgtgaatattagactgtatacatagtctatacatatatatatacacacacatacacagacggagagacagaaacacctgctgggcatcacacaccgttctaggtgctggggttgcaatagtgaacagagcaaacatccctgccctggtgggacttgcattccactcgggagtgacagtgcacaatagccataataaagaacagtatattggccaggtgcggtggctcacccctataatcccagcactttgggagcccgaggtgggtggatcaagaccatcctggctaacatgatgaaacgccatctctaggaaaaatacaaaaaattaaccgggagtggtgtcccgcgcctgtagtcccagctactcgggaggctgaggcaggagaatcacttgaacctgggaggtggaggtcatgccactgcactccagcctgggtgacaaagtgagactccatctcaaaaacaaaaacaaaaacaaaaacaaaacagtatatcgtctagaatatatacttttatatagtctgtatacttatgtatattacatattatttatatagggagactatatatgtatatatatatatatatttagaaggtgataagtgttatggaaaataatagagcacatggggtgcttccttccaacctttcagtccatgctatcctattctgtccccatctgagtacttaaggacctgtgagggactctcatgctaccgggcccctcttccctgtgctcctgtaggaactcatagaaacagaatgtttaggcctggttgggatctcagaggttttccaggaggctttccacctgggttctgcctcactgctgatggatgatggtgtgtcctgtgtcgccttgccaggggcttctcagcacactgtccacataaccctgatgctgtccaagctgagccttccaggaacctgcaggaggcaggctccttttcccagaatcctgacacaaactgtcttgttaagcagggaggtcgggggtggggcccgtgagtccaagttcaaggaacttggtttctggccagtccctgccggggaggccccggcagccttgcctcccacagctgataactctggtcccgaaactgctcacttccctactgccatataaacaattacattaagagcacaagtaaaagaccagccagaacaatcacttagaagagtaactaaatgaatcagagcagctggagaagatattttaagaccccagaaatcactgcacatagaactggatgggggcaattgattatgaatcaaacagatgtcaattgccagttttagtacaagaaggaaacaaaaggtcagtatattcctcctggactatcttgtgagaaatgaggatatgaaggtagcagagttctatttaaaatgagctgcagtcatttcagcataatctcagtgcagaacatggcaggttttaggtacgctgttgagaagaaaattccaggactgtcttttctgctgggaatgttcaagttctggtaaaggccaggtgcactggctcatgcctgtaatcccagcatttcaggaggccgagatgggaggattgcttgagcccaggagtttgattccagtctgggcaacatagtgagaccccatctctaccagaaaatttaaaaattagctgggtgtggtggtgcatgcctttagtcgcaactaccagggaggccaaggcaggaggatcacttaagcccaggaagtcaaggctgcagtgagatacgatcatgccactgtactccagcctgggcaacagagcgagaccctgtctcaaaagagaaaaagaacaaaataaaatttctagttaagaccaccgtaattctgacccctgttgagaaaatgaaattagactctatttagacacgtttggcctaatgatgttcaaaacctcctggagccaaagcccaagtgagcatacattgcaatgtgagatcaggtaccagggggagttttgaattttgtgatcatagggatcgtaaagtaccagaagcttctaatggagggatgatttaggttctgctccagaagctctttatgaagtaggtaaacacccataacctgagaccagttcagattatgcctgcccctgaaccttcttattaaatcagttgtgatttcgggaaccttggggaatttatgacatgagagatgatctgccagggttcaaaaccttgttgctgctgatgctttgggctggatctttatttgctgtggtggtggggggcggctatcctgtgcatcataggaggctgagccgcaccctgggcctctctctgctcagtagatgccagtagcactgcccaccccacctcgcctctgttgagacaaccgaaaatgtccagacattgccaggtgtctcctgcaggaggcaaaatctccctctagtgagaactcctgttctagggtgaccaaccatcccagtttgcctggaactgagggattttctggcaggtgggactttcagtgttaaaaccagggaagtcccaggcaaaccagatgagttgtccacttggctgtgtcattgatatgttctattttataccaacgtttaaaagtaagaacccgggctggccatggtagctcatgcctgtaatcccaacactttgggaggccaaggtgggtggatcacttgaggtcaagagttcgagaccagcctggccaacatggtgaaactttgtctctactaaaaatacaaaaataagcctggcgtggtggcatgcacctgtaatcccagctacatggtaggctgaggctggagaatcgcttggacctgggagatggaggttgcagtgagccgagattgtgccactgccctccagcctgggcgacagagcaagcctctgtctcaaataaataaataaagtgagtaagaaaccaaagcttttgaaaagtctgtctttgggaggcattgacaaggcatctgggggaatatgatgctgcttgtggtatcattttgcccctctttttcctcaatgtctctaaagcctgagccctggtgagatgggccattggaggtttgatcctagcccatagaccaaggagactcgattcaaacttgctgcctttctaatagagaggctcttgtttgacacttagagtgagcatgagtgacagactttttcttggaattgtaggctgtgtgacagtatacatcatgaaagtgacagcaacagtggggactaatttaattccattttcctttgcaggccctgataaatcattgctgcagggaaaaataaattttactttctcagacaaatgattggaataatgatgtgctgtgaggaaatcgggggctgagagaagatctgttggtgggcttaaaagtatttaaatagcgcatcatggaacttgttgcaaatacctctcgcgtctggcctggaaaataccagaaggaacctcctttccagactgattagaagagttcaggccgggcgcggtggttcatgccagtaatcccagcactttaggaggccgaggcgggcggatcacctgaggtcaggagttcaagaccagcctggtcaacatggcgaaaccctgtctctatagcttgaacccaggagacggaggttgcagtgagccaagattgcgccactgcactctcgtgtggggatagagcgagacgtctcccaaaaaaggaagaagagttccataaaatatcagctatcttgactaaatgatcgtggttttttaggccatctcaatggaaaaggtcattgattatcgtgctgcatatcctatataagttggtggctgaaacagctaaaatagattctagaatctggggtcctgagggaccatttacaaatagaaaaagtctcgacttggatggaaaattgccaataattttcacctcccttccagaaaatgactgtggctcaggagtatagttctgctgggaggcttttaaattgctataggaaatgaattacggggcgaggaggtacttgggccccggactactactatgcatgaggattggagtgaatttgaggaggggtgcaatgtagatggaacccctgcccacaagaggacagtggagaaggggctttaataccgtagggagacatatgcgctttgtctaagctaaacaatgcctggcttacgtgagggagattctccaaccctgagtcagtccattaaaagcacaagaaaatcacctgcctgcaaccagaatccacatcttcccacactaccattggcatattgcgctagggtgtgggggcaaacaggaaggaaccaggggaagttttgctcatgaccatttcctgcacgcgagccagtgtaattttcccactgtcagcgtcacctgagttgcactccaacttcggtgatggatggaatacatcatcagcgaaagctataaaaaccccatccttttgagcagcgtgaacgtaagggaaatgagcagttactgcagagaggattttataggagtgaaaaattctgcatcagagcagcaagaaggattgttatgtgaatgatcaaactgcttctgctgactcctcagagcccgcctaagagcaggggccttcatctgacactcactccacttccggggaactttgctttcctatttgttttaaccctgattaacagcgcagagctatgggttaggtccggccagccactgagagtccatctttgtgttttcaaaagccaggcctggttactgtcagaaataagagaaacaactggaaaagacaggcaaggtacgcagtattttacgggctctgattgtcatttagatttcgcatccaagaggggtttgagacttggggttctgttagctccatgtcccttccagcctcctggttctatcagcttggaattcaaaaccgcttcttgatgtttcttatttccaacatgtagctaagttgctgagagtatacgtcgtcttcctggatccgatcgactgctaggcatgagtggcccagacacttagctataggccccagagtagaaaagtagcaaatggtagcctctggaaggacagaaacacttggttatcgggctggaataaaaatgaaatcatgggccgggcgcagtcgctcacacctgtaatcccagcacttttggaggccgaggcgggtggatcatgaggtcaggagatcgagaccatcctggctaatacggtgaaaccccgtctctactaaaaatacaaaaaattagccgggcgtggtggctggcgcctgtagtcccagctactcaggaggctgaggcaggagaatggcgtgaacctgggaggcggagcttgcagtgagccgagactgcaccagtgcactccagcctgggtgacagagcgagactccgtgtcaaaacaaaacaaaacaaaacaaacaaaaaagtgaaatcatgcagatgtatcttaaggaatagaaatattacatatttcaatataatatttaaggaattagctggggctgcactgttctctaagttttgcctctgaagaaaaacaaaacattgctttctggtttgcaaaagaccctgggacctgtgccttttgagaatttgttttctgcaaatgactgctccagaggaacagctgtgtcattttattggctttctaataactttccgaaacaaattgctgcaaattaggtggattaaaacaacacagatttatcctctagcagttctgggggccggaaacccaaaatcaaagtgttgttttcttctggggaaactgagagagaatctgtcccgggcctctgtcccagcttcttgtgttctttggcttgcagcaacatcatttccatgtctgcctctgtccttgcatggctgtcccctcggtgtgtctctgagtctcaaatctctttctcctttctcttataaggataccagtcattggagttagggcttaccctaaatccaggatgatttcatcttgtgatctttaaattaattacatctgcgaagagcctattttcaaatcaggtcatattcacagttactggagattaagatgtggatccatcttttggggcagacacaattcaacccactacaactgtattttgttgctcttcctatctctaagttgctgctctctgttggttttgtccattttcaaaatgtcacttgtatgagttgcttaggctgacatctatctctaagattagcttcctctccctgccagtgtttgggcttaaacattccgtgataccactcctaggaggcaaaggtcaggctggccaaccctccaaacatggaacccttcaggccctgaattctcatgtctttgcaaatccaaagaggacaggctgacagtctgatggagtcccccaccaggctgtagccttctgtctttacacattttgagagcacttgaatatgcacgggaaaaagttaactatgacaaagaccgaagagatggggaaagggcagctgtggagaaaagagatgccccagaatccccctgatttctccagcattttatccagaaagatgtggtagtgtggtgagactctgaacagactccaattgtcttttttctttctttcctcttagcaaactgcctagttgggctagagctgttgtccccaaaatattttatgtgacagagaaggcttggaactattatccctacacaattacaggtaagtccttagtacaaccatatggcacatgtagtgagtgcaaggacatagcatagttgaatttcactgatttacagttgattatccaagcagggccttgtgggagccccgtagtatccctctttttttttttggtttcttacttgtaggttatcaacacttctaacacagacacagagatggcaggtgacaggggggttaagctaagccattccatcttcgttcttagagttacaataaatagtttacggagggccaggcgcagtggctcactcctgtaatcccagcactttgggaggccgaggcaggtggattacgtgaggtcaggagttcgagaccagcctgcccaacatggtgaaaccccgtctctactaaaaatacaaaaccaggaggtggaggttgcagtgagccaagattgtgccactgcacgccagcctgggcaacacagcgagactccgtcaaaaaaaaaaaaaaaaaaagcttatggagaaggaaggtgaagatctttatagagacatttccagaggttttatgattcttatttccctgtttcctcaataattcccaagtaatttaggggtataatttgtctataaacaagttgcttattatgacttgtttgtttttaccactccaaattttgactatactttgtataaaagattctattggatctctctttgcccccagatgacttcctttgctattagataatatgaaaatatttaaggtcagtctccctctcacttgcaatgcgatgacaataaactctttgtactgaatactgtcctagaaactttggccaaaaaaactcagaaggtttggttcctgccctcaaacacaccaaaatttgaaatcccacctcaacgtcatcaataacaagctcttcttattggttacaaaagctgcttttccacttaaaagatttcctttgtggttaatgaaatactctactggaattattagtctttcatttgcttttataatgccaactctttggtttttaattagccacaagcctataggctaattgaatcttgtcttactgttcttatctgcccaaccacataagtatcatgaaagaatttcagtgcaacacggagacattcagtatttatgaaagtttcattaggacatcttttgtaattatagttcgtcagtatttgttagttctgtggtttttatattgcatataagcatgatctaaatcatcttttgtctcttttttctttcctctcttcttcaaatgaacatgtggaaacagaatacacagtaagttccatttaattatttttaaacattctgtctatgatcagtggagtaattggaatgtctcttgtattacttgtcttatcaatgtaataattaaaaaggggaataattccgagtcagaaatatttaaatgtaggctattgcatcgttatatataatgcaataatttgaatgttctcatttgttcaagaatgtgaatcctaattgaaatcgccttgatagtcactttacgtaatcagcctttgcttgtaatttttaaatagcttgactgctttgttggtgatagttcactataataaaagaacagtttctagcaacgtgatattaaagagatgatggtagttatcgatggaaggtggggcttttactcatggactgtgtcctgattccttgttggagaagcttgaaagtgaagaggcacatgtgcaaactattttgcacaacagagatctgggttgggcagtcgctgtggcttgataaaatttcttcttctcctaagagcctctagggttattacttagactgaaagaaaaaaagacagaacctataatatcattgtgttgtggtattttcatttagatcattttcccaagcagctaacaggtcaacctatcacaacaagaaaatagtttatgattttttttttttttttttttttgagatggagtctcgctccatcacccaggttggagtgcagtggcacaatcttggctcaacagaaactttcacctaccgggttcaagcaattctcctgcctcagcctcccaagtagctgggattacaggtgtgcaccaccacgcccggctaatttttttatttttggtagagatggggtttcaccatgttggccaggctggtctcgaactcctgaccttaggcgatccgcccaccttggcttcccaaagtgttgggattacaggtgtgagccaccacacctggctaatagttatgattttctgagctgtgttaagagttgagtttttgggttcaatccaaatagccaaaggatagagaggtggtgagagaaatggaagaaaatgatttgtcatgccctgggcaggagcatagtacccaacgcatcgtaggtgctcaatcaatagttattgaatgacagaatgaacacacaaattctagatagataaatggtcccagcacaggctttggcgtcagaaaggcttggctgtcctctggttttgccactcactgccagaattcctaagcgactggctcccaactgccagttcttgaattcacactggtcctcgactatgttctcaccagtcctctgcagaatgaagaaaaaacaggaatagtattcagagattttcataacattaaatttatttcatccaaagtactgttggtaattatatcccatcatactcggatattaaaatatcttttcttttttgaaatgataggaatatatatagtatttccccccgcaatgtccctaactttgaaaaaagaggcaattttatggcaaaatgcaaatgtaaaattttagaagcaggggaacctttgctctagaatgaacatcttaacttttctgaacctgtttcctcttttctgaaattagaataatccctccttcctagagatgttagcggaaggattcagtggtctacccttggattggaaaacattgtctttagagggtcatattgtaaatgttttctgttttgtgagtcatatagtctctgacactgcaagagcagccttagatagtatgtaaacaaattagcatggtcatatatgcccaggcagcgggtcaaatttgtcccccaggctactttgccaacgctaaatataaagctgttagcacactgcctgtatacagcaggtaattaaatgattccctaccaccaacactaccccctagttccattgcttctggcaactgcataatcatcaagaggtagactttgggccgggtgcagtggctcacacctgtaatcccagcactttgggaggccgaggcaggtggatcacttgaagtcaggagttccagaccagcctggccaacatggtgaaaccctgtctctactaaaaatacaaaaaaaaaaaaaaaaaaaaggtagttgggtgtggtggcgggcgcctataatcccagctacttgggaggctgagacaggagaatcatttgaacccaggaggcagaggttgcagtgagctgagatcacaccactgcactccagcctgggcaacagagtgagagtccatctcaaaaataaaaaattaaaaaattaagtcaacggtcatttattaggcatcagtgaggtacaaaacatcatgctagatggcataactgagcaattatctctgtcatttggggtcacaatctggttggaaatagctggacattccagtcaaagcctggcagtcatcagcaagtgctgggcttttctggaggcaagaggggacttagccaaggaaacaagctggcctcagacctgtccactgggctggataagctctgaactgagctgccagcagagattcagacctcagcagagggcagaatcaatgactctggggaatccaaccagataaagcagttgcaatgtgaaaagaagggtgctggcctctgcattggggccttgagttttggggacagggctacagtccccaatgtgggagacaggaagaaaagtacacagcactcaaggaggttactcagtatcatggtgctggggagataaggttgtcaaccttagtaagtgaaaatacagaatgtccaggtaactttgaattttcagataaacagtaaataatatttagtataagagtgtcccacatgttgcatgggacataattatgccaaaagattgttgtctcatattttgtctggcaaatttatgggagagagatggtggtgtggaagaactggtctcagagactcaagtacaaaaatcagttatgagaacagggcacactgatgggccaagggaagggaggggtccagaagtatgtaacgtgggaacccatcctgcaattgacatgccataggaactctaaggtcagaccagagattcagccatctggtctgaatctctgctggcagctcagctcagagcttgtccagctcaatggacaggtctgagactaacagtcaaatgcactgatgggaccactccaagagccttcctgcctcagttaggattggctcaggaggtggaatggaaggagctaggcagagttcgggaaaattaagtggtagcagatgaatacataactgtcagcattttaaggaagaactgtgttgcatgtaagtgttagagctgaagtgcagacagaggattgtaggaaggagagagggattctgccagggagaaatatgaggaggtttctcagagaaggtcgcatttgggctggacctgaagggacagtacaactccccctgcagaggcctgttctgtgttagctcatgttgctctaatgaaacaccacagacttgggggcttgagcagcagacatttatttctcacagttgcagaagctgaaagtgcgactgggttcctggtgagggctgtcttcctggtaagcacgtggccatcttcttgctatgccctcacatggcagagacagagcaagttctctggtctcatctttgaagggcactaatcccatcatgagggccccaccctcgtgacctcatccctacctgattagtcccaaaatcccatctccaaacaccattgcactggggattacagcttcaacataggaatttgggggagacacagttcggcccatagtatgctccttccaggaccagtgggcaagtgatggaggtggatcctggccacctggacacatggatggagggcaggtcgtggtgttttcaatgtcaggtcaaggtctagatttaattctctgtgaggaggtcacattgttcctggctagttcacttttattttccatcccaaatataggacagcttttctttccatctccctggtgacaaggggatccggatttttctctctggctctagtgcagtcctccgggcccacagtgtgcggtttgaagctgccacctcttgactcagattcagccgtgttctcacgctctctgtccacgacagccctggtggcagaacccacccttgactctgactacagagtctgcacccaggatttatgacagatgctttcagttgccttagtcttttttcctgttttaaatgcttttgaattgtgctctttatcccctgatcctttaatcctaaatacctcttcttgctgtctttcccaagctccatagttcctgttcggtgcctcaaagcaaaacttccccaaggtcagagccccagttaggatcacggtgcccttcctttcctcagagaggcagcccggagggctcagaaacctccaaaccaatgtctcttcttggaaagcattagtccagagcacgaggatgtctatactaggatcccctaggtcttatatctgactgtttagcctattactcagacctcatgctgccctcattcgtgacaaagcccaggcaaagaaacctatttagagtcatctagggcttcagcactatcacaattatcaagacataagagctttttcatcactgtgagtgactgcgtgtgtttagaattatgtggaaatgccatttgcccaggaagtgggaaaaacatctttagcttgcttatgggaaaaaaaaaacacttaattatacagtaaacaacaacacaatgacagtttcacagaggacagaccattcaaccagttcttccaaactggtgggttcttctgaagttggtaaagtctgcaaagaaaggtgcctgaggagactggctgccttccaaaggagttgattttgtttttctagagctaaaaaaaaaaaaaagtctgcgctttcagatgagcataaatcagcagtatcaattcagccttggtactaatgaagaacaaaggattttcttcttgtttgtaggaatttgaaaacttaagttacaggaaatggatagcagggacctagagtaatacagttggcgtatatattttgcgaccgtgatcacccctctccaccggcatctctcttaataagaatccacaaaagaggagaaatgggatgcacctttgtgttagttagaatgacagaagcaaaggcagatgggttgtcaatgttacccaacattttaaattatttagatgagagaggtggaaaaataaaattgcaacagaccagggaggatgaaatgactctttcatgagaacctcaaatcgtattgagccactatgagagagagattactcagggctggtttagaagagccaagaaagagaggaaaggctgctcacagctgagagtctgtcatcagtcaccccaggtgaacccgggttatctgcccaggagtggccatggggagaatgaggtatgtttctgaaagccactaaactatctgggataggaattgccctcacagtctgggccttatcaagctcccccagtaatccaaagagctgataggtgctgtgtttagagaccagtgacccccattcctcccaagccccgtctcctttcttaagcctttcttccccgcaccttcccctgagtcccagccaaggggcagtacaaaccactgtatttcataactaggaacacaggaacaagtccagggaagattatgtttattataccagacctctaggattgggcttgttaggaaattaaagaaaaaaaatctggctatctcatctacgatgtaagctaagagggtgaaagtccctaagagtcccttctttgaggccatggagtcaggagttagcgggttaggaaataacttttatctatgtatcacaattaaccctcgatatttagtgcagtacataattttttttagacaaagggaaatatcctttttttagggaccaggccaaagaaacagtcctccagttgggggcactgatgagcaaggcagcaattaggcacgggcctgaaaagcacccttgtggagaagaggacagtaaggccaggtgtggtggctgatgccagtaatcccagcatttcaggaggctgagataggcggatcacttgaggtcaggagtttgagaccagcctggccaacatggtgaaaccttgtctcgactaaaaatacaaacattagctgtgcatggtgacgcatgcctgtaatcccagctcctcgggaggctgaccttgaacccaggaagtggaggttgcagtgagccgggatcatgccactgcactccagcctgggtgacagagcaagaccctgtctcaaaaacaaaaaataaacaaacaaaaaaacccaaaaacaaagaagattatgtgagaccggtgtcatcacagagccagaacgaccaagctcaaaaatcgtcacagttctagagaatttagatggaagcagtctagaaccatttataactaccattcaagatggtacacagcccattaagtaagggatgggctatacagagctaaacagattttataattataggacttctcagagcctttcttattctaatgtacattgtgaatctccaaagggagctgtggcatgcaacgtttcccgagctgatttgtccaagggatcttggattttgcaaggccaatcttttaagacttagaggtgttccagaaacttctctttaggtcagagccattatgtgcccactaactatgccagtggatcaattctatttcagtaaatgttatttttttctaaatttcagtgagctaatgtgttgcctgaagatgactattactcagataccaaagttttttgaagaatgcccaacagtaatggaagtgttttatttttagaatcaggtgacacagaacccgtaagttccttttcaagcaaagtcagttctgttcaaccacacagcaaagtcagcagtacgttgggatggcagtgggtttgtgcatttggatttgtttccatttagaaaatgaactggttgtatggacgagccagttgcaaaccagcctattcacagatgtaccgctgcccttgtgtgggaccagagctcgcctctacatctcagcaccccaattagtgcctggtgaagcaggagctttggaacagccagttttgtttgttcagattatcccgtttccacttgctctagctgttcccaagctcttctttggacttcagagaaaattaattcagccattttgaggggaaagagcaggtgatagaacacgtggctctactgtaacaaaacataacattttaaaattgtttgcatttttttaacaccactcgaaatgactttacagagggcaatcagcagagaaaacagagttgtttaagggaatgtttggtagaagattttactaagaaattctccttttcttcttttttgtttattttccacttgcagtactgaaaaatttgatttcccttctgcagtttacaaatgtctgtggagttgtgttcagctcagttgttgagatctgcagaatacaactggaaagattttgtgagcagatttctttctgtaaaaataaaacagtatgactatgggtataccaacatagtatatttcagggattaaagtgaatgcaaaggccgggtgtggtggctcatgcctgtaatctcaacactctgggaggccgaggcaggtggatcacttgaggtcaggagttcaaggcaagcctggccaacatggcgaaaccccacctctactaaaaatacaaaaattagctgggcgtggtggtgtgtgcctgtaatcccagctactcaggaggctaaggcaggagaatcacttgaacctgggatgcggaggttgcaatgagccgatatctcaccattgcactccagcctgggtgacaatgtaagactctgtctcaaaaaaaaaaaaagggaatgcaaaattgccctgaggtctttgatctttttgatcagtaagataatgtgaactacacgatagtgtgtatttctttactgtctagacaagtgttgatacatcttttcagttcagaattttaaacatcgattctactttcttaagtgagaatttgctaggttggtgaagggggatgattcttaaccctttttaactgagaaggcttgccgtctgaaagtttcttacctggccatatgctcacctgtatttgggaagtcacactgatccattcccatctctgttattattatttttaattataaattagaggcaggttttcgctatgttgcccaggctaattttgacctcctgggctcaagcaatcctcctgcctcagcctcccaaagtgctgggattacaggcgtgagccatcacgcctggccctatctctgttatttacatgcaattctttttatttgatgtggtctccctgtctctttaaattcttgtcttgccattatagtatgtagatatcagtattcatgagcatcctctgcttatttctgccttgacaagtccagccctagatcgtatgagcctgaatttcgtttccctgcatgattatcctagaagtgcaagtgagtagcaaaccatcccccattcagaaaacatgctttcattcatgtcttcggctctgtctcccttctggccttgctttcctagtgagttgctattactcagcatgtcagaggacgggaagaggatccatgagtgaatgaactaatgaatgaacagaagcctctgtgtagggtgcgggctggtgaggagcagcggagaggcccgcgtgcatttccatgctgtagctggaatacaagcagctgttttccggctgtgtttcggagctctgccttccacacagtcccttcctctcaccctcctccacatctctttcaggtcccaccattcctcttggccacatttttcttcctatgcagcatatatttaggaagtcactctgattcatcctcatctctattatttacatgcaattccttttcttcctttcctctttccttgaaaagtctactttttttttccccacttgagttcttcttctcacttttgtggaactatcttctttgcaatttttttctccaactaccctgtcaccataaccacccaccttatttgtatctaaagtcatacgtaaccctcacaaggcagaagggcgaagggagctcaaatatctccccttatttcctttgcatctttgcctgtatgataactaaggttctgagtagagggtgacggccagacatttacctttttgaaattgatgtgtgtattaaagatcttctgtgcacaaaacagaaatttatattttgccttccaagcgtggggtaaaatttctatcaaaatggggagataaaaattttttaatgaataaaggaagctgaaaggtattttaagatctaggttctaccaactgtctgtatacacatttatcatccactttcttctacttttcaagcaacacaggcttttctcatttattttccagtagctccagcctcagagtcctggaagataataagccctaaactctatgcctgccctcattagcactgtggaacattctggatgtgagtctcctgttggtgaacagaggaaacacttgcaaatctagttttattaatgatcccatcttaagttgcaattcccagtgtggctttggagcacagttaatatgacaatatagaatacagtaccagagaatcgatgtcatctacaggggaactccattagagagaaagtcaagtctgtatagagtttcgtgcttgtggatagcagggaacacgttctacatactgttggaacaagatggcaagagaagaatgcattgaattccagataaaagctaaaaggaaattgtcttttaaaagcctataaatacttcatcaaccccaagccagctcctcaactcttccatttaactttcttgatgttaggcccgttgtaaagtgctgctctcagacatggaagaatttgggctggtaaacaagaataaagcgttgagttactgggctgagggttcttctcaatgagtggttttcaaactgtcctcctttaggtccaggagattccatggacaggtctcagtggccattctgtccctaatattttatttaaagaaaaactctgatgccagttaaaatggtttgaaaactactgaactgtaatatctctcagctcctgccctactctaaagaccatgaataagtgtgatgtatgtgggacaggaaccacttgaagcagcagttcccaaatttaacagatttgcaactcctctgtctacttagtggtgcttatattagtcaaggttctccagagagacagaaccaatggtgggggagatgtggggagagagagaaatgggtggatggatagatagattagatagctagattagatatgtagattagatagatggatgaatagatagatgattgatagatattaatagataagagagatggatagatagattagctagattaagtagatagatagatgatagatattaatagatagattgattagataggtagattggatggatggatggattgatagatattaacagatagatggatagattagataggtagacagattagataaaaagatagattagataggtagattgggtggatggatggatggatggatggatggatggatggatggatgagaggggatttgctagggaaattggctcacatgattagggaagctgagaagtcccacaacagcccacctgcaagttggagaccctggggtgccagtagtgtggctgagtccaagtcagaaggcttagaaccaggggagccgcgagtgtaggtcctggagtccaaaggctgaggagcctggagtcgttatccaaggacaggaggggaggagtgtgtccccactccagcagatagatccatacatttgcctttcctctgtattggtcctctccagcccctcagcaggttggatggtgcccacccacattgaggatggatcttcctcacctagtgcataccaactcacatgacagtctctggaaacaccctcacagacacacctaaaataaggctttactaggcttctaggtattccttaatctagtcaagttgacgcctaaaattaaccatcatagtgttctttataacataatcctctttaagttaaagtagattaaattataagaatttttggaaaaccttgtgacttcctgtaagataatatagttactctgggatgccattgatgtattcactcatttttaaattggatttaaattttttctgcttactaaaatagtagatatttattgtaacatccaagcattataaaaatctataccacagaaaataaaagaacttcataatttccactactctcctccatgagaatattttcccatgtttttcggtgggtatactagtttttcaatgtttttcagtgtgtatactcgtttgccatgtttttcagtggatatactagtttttcaatgtttttcagtgtgtatactcgtttgccatgtttttcagtggatatactagtttttcaatgtttttcagtgtgtatacttgtttcccatgtttttcagtgtgtatactagtttttccatatttttcagtgtgtatactcatttgccatgttttccagtgtgtatactagttttccatgtttttcagtgtgtgtactagttttctgtgtttttcagtgtgtatactaattttccatggttttcggtgtgtatactcattttccatggtttttgatgtgtatattagttttccatgtttttcagtgtgtatactagtttttccatgttttttcagtgtgtatacttgttttccatgttttccagtgtgtatactagttttccatgtttttcagtgtgtgtactagtaattttccatggttttcggtgtgtatactcattttccatggtttttggtgtgtatattagttttccatgtttttcggtgtgtatgctagtttttccatgtttttttggtgtgtatacttgttttccatgtttttcgatgtgtatactagtttttccatgtatttcagtgtggatactagtctactttctttttgtttttacaaaaatggggctatcctgttttacactttgtttttttaatggttttagagtcgatcccaatgtacttaaccagccttctactggtgaactttgacttgtttccaagtttttttataggaccaacaatacagttaatgaacatgtgtttttttgtaatattttttcacatctcagaattcatgctggagttctgggcagggttttttgtttgtttgttgttttttgatacaggggcttgctctgtcacccaggctggagtgcagtggcgcgatcttggctcactgcaacctctgcctcccaggttcaagcgattctcctgcctcagcttccctagtagctgggatgacaggcgtgcaccaccatgcccagctaatttttgtatttttagtagagacagggttttgccatgttggccaggctggtcacaaactcctggcctcaagtgatccacccgtgtcagcctcccaaagtgctgggattacaggcatgagccacccacagggcctggacctgtttttaaaagcactttcataataagaattaacctaagccattatatttcaattcagtttttgaaaattattgtgttttcaaggtactagggtaatttggcatctaaaggaataccaatgaatttctgaaatgaataattatttccctaatatatcttttgagtaactcctgcttttcctgatttgggtttgtttgaagcaaggcacgtctatcatatgacagattcacacacacatattttctctgctgttagtggccacagcacatactgagaagcaaagcctgtgctttcaacctctgcttccctggaagcacttccatgatttcctgatacttaagaatcagcatgagatcacaagcatgcatgtcagagctagacagcctggcttgaatcccatctcctctatgcatttgttgtgtgacttacagcacactgttggacctttccgtgcctttgtttcttcatctgtaaaatggggatgtatgagggttaatgagttaatagatgaactaatatatatcaaatactcggaccagtgcctgttgacaggaaggacggtataacactattgtcattataacctctgtattgggttgtgtctgtccctcactggacatgtggaatgttggccaggtctcctttggattgtcattttgacccagaacctcccagagttaagaaatacctggacaggccaggcgcggtggctcacgcctgtaatcccagcactttgggaggccaaggcaggcggatcatgaggtcaggagatcgagaccatcctggctaacatggtaaaccccgtttctactaaaaatacaaaaaattagccaggcgtggtggcaggtgcctatagtcccagctagtcaggaggctgaagcaggagaatggcatgaacctgggaggcagagcgtgcagtgagccaaaattgcgccactgcaatccagcctgggcgacagagtgagactccatctccaaaaaaaaaagaaatacctgggcgacgagacgtgctatcaaggaggtggggaagttggaactctcctacactgttcatgggaatgtacaagggtgcagccactttggaatggggtagccgtctggaagttcctcagaaggttaaacatagagttacagtgtgatcagcaattccactctaggtatacactcaagagaaatgaaaacatggccgggcgcagtggctcacacctgtaatcccagcactttgggaggccgaggtgggtggatcacgaggtcaggagtttgagaccagcctggccaacatggtgaaaccccatctctaccaaaaatacaaaaattagctaggtatggtggcaggtgcctgtaatcccagctagtctggaggctgaggcaggagaatcgcttgaacccagggggtggaattgcaatgagccaagatcacaccactgcactccagcctgggcaacagagtgagactccatttcaaaaagaaagaaagaaaggagaagagaagagaaaagaagaaagaagaaagaaagatagaaatccacacaaaaactcgcacaagaatagctgtggcagtattgttcatagtagccaaaaaatagaaacaaatgttcatcaactgataaatggagaaatcagatgtagtatgtccgtacaatggactatcattcggccagaaaaaggaatggagtacccatacatgctagaacatggatgagccttgaaaacatgctaagggaaagaagccaggaacaaaagaccacatatgatacacttccatttgtaggaaatgtatagaatagacaaatcttagagtagattaggagttgcgtacattgtggtgctgcaggtaggcgggaatggggacgtgactgctgatggatacagggcttctttgggaggtaatggaaatgttctaaaattagattgtcctaatggttgtataactctgaatatactgaacaccattaacttgtatacttgaaatgggtgaattatatggtatgtgaataaagctattttttatttattttattttatttttttagagatgggatcttgcttgctctgtcacccaggctggaatgcagtagtgtgatcatagctcactgcagcctcaaactcctgggctcaagtgatcctcctgcctctgcctgctgaatagtaaagctatattttggggggaaaagggggaaacagctcctgagtttgggggtgggctcccagaatataccagcttactgaaagcgaggcatcgggagagaggcctggaatctgtttttaacaagcccagcaaatgaggcatcattaagtaggtcttagaaatacactgtcatagagaatacttttatttttcttttacattgtaaagtgggatagggtaggattaatacattttagcttacgtttttgccacaggctaggtgctgtggaaatacagtatcctttgatgacaataatgacagtcttcaaagtgagcggtgtacattcttccagaagtttcgcacttcctgcttctgaagtgcagtgccctagagagcctcagacccatccccagggcccccattcactgcagccactatcgtctctctccctatgcaggtgctgagacagaaataagggctgccagcaccacccagaaactgactatgaaatccccaatgtgtctgaccctttctctttaagactttggtttgcttacatttcattttgttcctgtaagtgtttcttattgccatagcaaccctaatcgatcactggaccaaaaatagctctttcatgttttccaaagcatgtctgtagtgaattggaaattcagttctgccgtgcattttgcatatgctgctttcatttcccgacactgaacctgggagggcttgtgtctggaaattattcttgcagagacccagaaacctcacttgtctttcctggcgttcttcttccccactgcagatccacccgtcacttccaaaagctacaagtagctgcatttaaatgttccaccatcacttttctgcacattgagttttgggtgctggaggttttacaggtaccagaatatcacttttcaataagaggttcatcctggtggattccgttgggtttggaaggccaattatagatgcttagacaccagataaaaggaagagggtcatggcagggagcagatggcagcaacacctataagattcctctggcttacgtggatctaagctagaaaatcaaagatgagatgacaggagagctcctgccttgactccctgacttcttcctaacactgctactgtttttagggggttggggcaaaataaacactggatgtaattaagtgaatattttctatgatgctttctctgctttattctccctgccaagctgtgcctttagtcaagaagagggagagagagataaaaaagaaaagatttttcatgagaaagaggattcgagacctggagtgagcccagaggaggaagaagaggtggagagggacagaaatgactcactgatttcccccaggctccagggacaggcgtgcttttttgcctccccctctgcctgtaagcagagtcatctctgtggcctcaagggttcccaacttctgttttatgcttctgtttcttaacttctttgagccttggttttggcgattgggttgagtgaaccagcggacgtgcaccctttagatctaggaaagaaaagagttcacggagatcctggtagagtttttgttccctgcatgaagtcagcagggggccaagggaaagctcagagaagaggccagtggaaggggcacctgcccagaagaaggagctgccaaggatggagcctgggacacgtggtgacatttcctcagcagcagagcaggtcagggattcagagtgagtctggaagagcccagatctgctctgtggtttggctgccttccttgccatgggaagaagccatcaggtgtcctgtggatgcctttccggaagcctctgcatccttgcatcttcatagtggaggatctgcctttgaccccagctcagctttctcgtccacattgcctaggagggtacaatggagtggaccaacatctctccagcatctgccaggcgctgcctggccctggacattcgttatctcttttcattctcaccccacagctttgaggttgcaattgtctccatttgatagatgaggaaactgaagctcagagggaatcgtgaatttgccccaagtcacacagtttgttggaaaagaagctgcggtttgaactgaagtctgttttactccaaaaatctgtattttttttttttttcctactaaatcatcatcctccctctctgtgggttaggtgcctgctgctgcatctggacaccagataatgacaagcttgctgacatcagttactagtaaatatcaccctgggcaataagcagtggccattgattgacaaagcaggtggcatcataggtggaactaataagtcagaaaaagcaccaattcccccttcccttgcacttgcttgaacctcagagtcggtgatgctttactcagatgaaaaccagatgggtgatttggaagaaggcagccagcaggctgagtgttgtgttggttttctcttgctgtgtagcaaatctcccacaaatttagcaacttaaaacaacacaagtggctgggtgcaatggctcatgcctataataccagcactttaggaggctgaggttggaggatcgcttgagctcaggagtttgagaccaacctgggcaacacagtgagagctcatctctactaaaagtaaaaaaaattagctgggtgtggtggtgcatgcctgtgatcccagctgttcaggaggctgaggcgggaggattgcttaagcccaggaggtcaaggctgcggcgagctgagctatactgcattcaagcctgggcaacagaatgaggctctgtctcaaaaaagaaaagaaaagagaagagaagaaaaataacacaagtttgttatcttgcagtttccatgggtcaggagttggaacccaggctagctgggtccttggctcaggcaactcaccaggtagaaatcaaggcatcaaccaaggttctagtttcaccagaaatgcagggtcctcttccacgctcactggtggttggcaggattcattccttgtggttgaaggacgaaggtcgcgttttctagctggttcttctccggctgtcactctcagttcccagtagacctctcttgggtcctatccacgtggctatctcacaacttcaaagccaacaaaagaatctctgctttttctaaagtgaagtcttgtatacactctcaggagtgactgactgtcttgtctttttgctatcaatcaaaagctgtgctccctctgaaggttctggggggcaaccaggggagtgacagcccatcatatccccaggttctgctcacacccgaagggaaggattacacaggatgtgtgcaccagtggctgggactctggaggccatctcagaattctgtctgccgtgggtttttcagtctttccttcatatgctgtgggccaaatgggactttagacattcagcatttccaaatgactgttccttagagagcacgggatgcttcagcagcccttagacatctttttctgttttagccaatggctgacgaccctagtgtctctcttcttggagcaagttcaggtgtggttacatcagggttcccaacgttttttccacccccacactcctgacagatccctcggtgatatagaatccctccacccaaggacatttatcaggatctttagggaacagcgcatattttgagaaaaagtccagggttggaaagtggggttcccgtctccccattgacattgagaatgactaggttagatggtatattcctagtggaagcaaaagtcttagttacagaaagcattatttgagcaaacctaaactaaaggagatgctttaacacctgaagaagctgggtaaagcggggggggggggtaaagaagaaggggggtgactttgatgaccaccattcctagtggtgctggtattaggggggcaccctcctgttagagtgtgagcttaccacatggttggtgagcctgggacacagatagctaatggtaatggtgacaaaggagatacgcgctgtgataaagggacaaacagaatgctgccagcatgcatgggataatcattccgaagtggtacttgagatggtctttgagtaagatttaggaaagaaatttcgggctgagagtaccatggccaaaaaaaaaaaaaaagacctgacagcaggaagttttccagggaagggggagtggacctagatttagggtgggtccaaatccaatgacttttgtccttgtaagaagagaagagagcacagagacccagagggaagaaggggatgtaaagacggaggcagagactggagtgatgcacccactcccggtgccaccaacagctggaagagacaaggacagattctctcccagagtcttcagaggtagtatggctctgccaacaccttggtttcaggcttctggcctccagaactgtgagagaataaattgctgctgttttaagccacgcagtttgtggaattggctacgataattctagagtaccagtacagtcagggagaacattcgcgttcattctggacctttcaagtttgatgaacctgtagggtctttgttggggatggccagtgggcacctggaaatgtgagaggagttggaatttgagatgttgatttgggaggcatctgccaaaaaagaaaaaaatcatgaaaagtcagaagcagatgagatcaccaggggagagggtttggatcaagaaaagaggctgtaggtagggtaggacctgagggatctcctgtagggaaggagtggaggagggaggaaagggtgaactgctgctcaggatggaggagttgctcagtcatattgcagtgtagagaggtctccagggtgcaaatggaagagtgatgctgctttggaaatcctttgatgatcaggtgggaggtggaaaaagtagagacaggaagcactgaaactgaatactctttttttttttttttttttttttgagatggaggcttgctctgtcgcccaggctggagtgcagtggcgcaacctcagctcactacaacccccgcctcccgggttcaagcgattcttcccgctcagcctcccgagtagctgggattacaggcatctgccatcatgcccagttaattcttgtatttttgtagagatgggggtctcaccattggccagcctggtcttgaactcctgacctcaggtgatccacacacctcggcctcccaaagtgctgggattacaggcatgagccaccatgcccggctactgactactcttttaataagtttttttatgaagacagaaagagatacggaattgattatagatgggggaagaaataggatcaagggaactttgtgcttatttattttttaagactgtgtctcttttcattatatttttaggctgtgggaaggaagcagggaaaagatgcaaataatcaatgaaacaaggttccagagaagagcttacaaataatttgtactgtgcacctactatgtgccagtcactgtgctggggtttagctgtgtgatctcattgatcttctgaacactcctacagagcggaaaaggattgtccccattctccacctggggcaactggggctgagaacagtaaaataacttgcccaggttgatacatcttggatttgagcccaagtcagctggctctgatgtctcagtgcttttcattatattatttctccactgaaaaagaggaggatatatctttctcggattcacaaagaataagaaacgtaaagaaataagcagatttgtaatggaggaaagggatgtgtcagtgtttctatcatgcagttcatgtcctcattaaactatgactcaaagtgatcagctgcaagggagaggggagaaagggtgaagccaggcaagggaccttgagagggtaagggatgtaggatagatcagtggatgagatataacagggagccaatcaggaagaaataaaagaccttgctttaaagctaagcttccgctaggattagtgggctggatttttggagaaaccagcctgcatgggggaggcagaaggttatcttaacatggacatcacccctgagagatttcagtgacggcactgaagaagcccagagccacagataattctgattttaactcaagacacccgcacaccccaggactctgagaacgagtcatcagacatcccaaggggattatcagccccaaccacctgccgaaggagaaagtactgacccgcttggagttaccaggagctgttctctggccaccctgctgaagccaggtgcactactcctagcctcgtggcaaggttgccattctgatatgaaaataaccaaagtccccactcaaaaataacaacatctgctaatttgcatgggagttttgcatttcataattgggtttaatacgcaaatgctaaaattcatgtgttgggctagctaagtggtttagaggttcagtgggtaaaaactcctcacagtgttccactctggtgcaccgagacccacacccacgctccacaactctgtactctccccactccttggtttgactctcatatgaattatgggataaaaaatacaaaatcgatttacctaaaggcttgtcgtgtctaagagggtctcagccagggcatccccccacgttctcatgtctgctttggggtctgagtcctccagcgtcttcatttgagatgagcagctgctccttggtgctacctgaacccggatataagggcagcggttatggagtgagaagtttgagaggagacagcagagagggtgttaatgaataatcgcagggccttgttctccataaaggcaattactgggattgattgtttccgtgtttccttagtcacggttcagatcccttgtttcactcagattaagacagatgcgtgctgaacgcgtcctggcatgtgatgtcaggagaattatcgatggcacgtcccaggcctctgtcttctcgtgcaggtgccaccaggggtctcagctgggctgaaaggggagcgtggtcattgtgcggctgaagcatgtgtgtgctatagccaggtggttttccaggttgagcatgcctcagcatacactggagggcttggtaaacagattgctgaaccccacctccagagtttctgatttagttggtctgctgaagaatttgcctttctttctttctttctttctttcttttctttctttccttctttctttctttccttccttccttccttccttccttctttctttctttccttccttctttctttccttttttttttttttttttttttgagactgagtctcactctgttgcccagactggagtgcaatggcatgatctcagctcactgcaacctccacgtcccaggttcaagcgattctcgtgcctcagcctcccaagtagctggaattacaggggtacaccactacacctggctaattcttgtatttttagtaaagacggggtttcaccatggtggccaggctggtctcaaacccctgacctcaggtgatatgcctgccttggtctcccaaagtgctgggattacaggcatgagccaccgtgcctggccaagtatttgcatttctaacaattctgggctgctggagctggtccagaaactcctctttgagaaccactcagtatggtgaagagtatggacactgagacctggccacctggctgcatgagactgtaggccatttacttaccctctctgcacctccatctcctcatctttaaagcagggggggatggtaatagtacctccttcacgggattgttgccaggaataaatgagtgagagcatcagagcatttgtagcagtgtctggtatagacagtatgtgagtactggaatcatgtataagggatccagcctcttgggactgtgatgctatcaggccaagtctggtttccccaacacccacagatcccaatgcaggtgctgggtcattttgcccattagccgtcaatcccatctctggtggccaagaaagttaatgcccagcttagggctagctagagcgtggttacaccaacatccatcaaaattctcttcttaagccaccttaacccttcacatctactgaatgcataggacttgactcagcgagactggggctgtagggctgggttgcatttggggtttctgtccctcgtgtggacaaagacaaagacaggggctgccttttctggttcagtttctacccatggatgctgtctgctgaatgcattcttgctgcccagtattatacatttttaaaacatcattttattaatatttaaccctcacagtgttgctcttaggtaataattattactcctgttttaactctgttggggttcagagaagttaaatgacttatccaaattacatattaaaagccaggtctcgcccggatgcagtggctcatggctgtaatcccagcactttgggaggccgaggcgggagaatcgcataaggccgggaatttgagaccagcctgggcaacagagagagacccttgcctttaccaaaaaaattttaaaaatccgccaggcatggtgtcacacacctatagctgtagtcccagctacctgggaggctgaggtgggaggatcgcttgagcccataggtcaaggttacagtgagctgtgactgcaccactgcaccccagcctgggtgacaaagtaagactctgtctcaaaaataaaaataaaaagaaggccgggcgcctgtaatctgtaatcccagcactatgggaggccaaggtgggcagatcttttgagctcaggagttcgagaccagcctggctaacatggagaaaccctatctctactaaaaatacaaaaattagccgggctacacggaaggctaaggcatgagaatcacttgaacctgggaggtggaggttgcagtgagccgagaccgcaccactgcactccagcctgggcgacagagcaagaccctgtctcaaaacaataaaaaataataaaatttaaaaattaaaaataaaatttaaaatttaaaataaatttaaaaattttttttattttactttaaaaataaatttatgttttaaaaattaaaaataaatttatgttttaaaaattaaaaataaaagccaggtctgtctgacttcaataatctatgactttaaagttctactatatccccttgctaatgttatatgagcatttatataaagattaaggctgggtccccaggaatccagcaatggtagctgctccccaaaagtaagctcaccagaactggaactggcgtgatttaggggtttgcttttctaaagcttatgctaggagtcacagaacatattccttttggaaatgttctcttcagggacttgccctctactgctggttattctctgtggcctgacctctgtctggatgaaactgtgttcattgtcctaaaggcggctttcctttgtctgaatttggatattgacttagtatcttaacatttctgttccgggacggtgcttgcaaccaaatggccaggaaagtattcagaagctctgctgaatataggaagagagaaaaaatgttatgctaatgaaagtttgcttttctcccacagtgttcctttctgccgaaattctccattcatatagaaaccaagtatgaggacaacaaaggaagcaatgacaccgtgagtagcccctccttccatgctgcgctcgcctcgtgggctctgaatatcacagcacttctcacagcccctctgtgaccagggccagcagtgggacctgtgcctgggacctcagagatgttctggcctttggcttctgagggttatttccctgggacttttccctggaattcttttgttgtctagcttttctttcttctcatttttatgtactttccctgggcctctgagcagaagcctctgacctggggtgattgtcatggaggtggagaggatgacagggcacttggaactccaagatttggtttttgatcattggacagagtacacatcttctcaatgcctattaatatctacttcggaaagggaatacaatcaaagatatgtgtacacagaaaaggaaatacagtcagatgtatgtgtgaacagaaaaggaaatacaggcctggtgcagtggctcacgcctgtaatcccagcactctgggaggctgaggcaggcacatcacctgagatcaggagttcaagaccagcctggccaacatggcgaaaccctgtctcgactaaaaatacaaaaattagctgggcgtggtggtgcacaccagtaatcccagctacttgggaggctgaggtaggaggattgcttgaacctgggaggcagaggttacagtgagccgaggttgcaccactgcacttcagcctgggccacagagcgagactccatctcaaaaaaataaaaaaagagaaaaggaaatagaatcagatgtgtgtgtgcatactgcatgcatgcttacttacacacatgcggtgtatgtatacacccacacatcctaccttaaaatcagggggtacccccacaaaatatttacctcctgaggcattctgacttttactaaatttcagccaagtattttgcttattagtgttgggtaaaacccatcttctgacctggcttttacccccaggctctttctgtttgggcagtaaatttctaacttctcttttctttgggggtgactgttttgacctaccaaaagcctcacctgggattaggctgtgggttccctcaggacccgttgaaaggaagaacctggatctagaagcttcggggcttccccagagttcatggaacttcccagaggagagaaaaatacagctggcagcagtactatcctaccactctgttcaggaaccccatcgttagtgtctccttgaagtggcagcccaatgggaaatgtttagggccattttcctgtcacagcctgaaatcacaggcgcgttgctggccaaattcatcaaaaccaccatgcctaaaacagtgtcacactgtgtttcaacttgaatccttgtaaaatagtgaatttttttttttttttttttttttttttctgattagaaagcagcctgggcgcggtagctcacgcctgtaatcctagcatgttgggaggccaaggtgggcagattgtctgagctcaggggttcaagaccagcctgggtaacatggcaaaaccccatctctactaaaaatacaaaaaattagccgggcgtggtggcgcatgcctgtaatcccagctactcaggaggctgaggcaggagaattacttgagcctgggaggcagaggttgcagtgagcgcagatcgcgccactgcactccagcctggcaacagagcgagactctgtctcaaaaaaaaaaaaaagttaatacatggctattcaaacttggagaatgcaaaaagaaagtattgaaaaaagaaaggaaaaaccaatagcaatcccacaatttagagatgacttctgttagcaatttggttcatgttgcagattatggacaaatttattttttaaccaattcctcctgaattgaatcatatagtatgttatttttaacatgccctgaagtatgcttccctataatgatttttcctggctgtaccaccttccatatttcagtgtacttctttaaacaattgctggtcactggatattgaagtaagcttgactcttttcacgtagctgtggactctcatgaaaaggataataaagttcagttgcttgaattgcttttcctggcataatatgaaaatatgggggaattttttttttctttataagacagggtctcgctctgtcacccaggctggagtgcagtagcacgatctcaggtcactgcagcctccacctcctgggctcaagcaatcctcccacctcagcccccctactgggactacggcacacacaaccgtgcccagctaatttttgtgttttttttagagacgtggttgtaccatgttgcctaggctggtctcaaactcctggactcaagcaatctgcctgtcttggcctcccaaagtgctgggattacaagcgtgagccaccatgcctggctggaaaaaaattttttaaatatcttttagtctttccaaacaaatttccttgctttctctctttttctctatgcctctatctccatgagtttattcaaaacagctctccatttgaagaggtgtagagaggccaggtgctatggctcacacctataatcccagcactctggtaggctgtggtggacggatcacctgatgtcaggagtttgagaccagcctaggcagcatggtgaaaccccatctctgcaaaattaaaaaattagccaggcgtggtggcacacacacctgtggttgcagctacctgggaggctgcagtgggagaatcgcttgagcccaagaggtcaagcctgcagtgaaccatgtttgcacctctacactccagcttgggtgacagagtgccacctaaaaataaaaaagaggtgcagaggggacacgtggcctcactgtgatccctatagattggtgggaccactgtaatctggtttatcctctgcccagttcaaatcatccccaaaattcatatggttattgtgtattattatacatccttttttggcaggtgctcaggttttttgactactctcctaggaatttaaaataacaggttatccaccttacaatcaggatccaggcccatgccaagggccaggcccctttgagacttaggctgggctgcaagagaagcacctatcacctattcactctgtgcagtccttggacacagtttgcttcctctaggagaaatctcagctgttgtagcctggcttgcctccctctccccagaatgtggactctggaactgcccaggggacctgctgcttgtctgcctgtcatggcacccaacttgcccaagccccagtcctgccatcttgttacactaaagaggccctaaatgtgtttttggcccagttgccaccccctgccccccaggctctgcttgaccctgctccacggaccccaggtcttgctcctgaggccattggaccacacggcccagccccacttcattagacttctttgccaatttgccctcctctgttttacatattcagcggctgttggttgtccagcagattcaaagttggtcccagaaaggcagaaaaggagcgttgcgccgaggcacggtggctcacgcctgtaatcccagcactttgggaggctgaggtgggtggatacctgaggtcaggagtttgagaccagcctggccaacatggcgaaacctcgtctctactaaaaatagaaaaattagctgggcatggtggcgtgcacctgtaatcccagctactcaggaggctgaggttggagaattgcttgaacccgggaggcagaggttgccgtgagcagagattgcgccactgcactccagcctgggtgacaagagtgaaactctgtctcaaaaaaaaagaaaagaaaagaaaaggagggctgcatccgtttccattcatacttgttaatacttcaaaatctgaacataagaagtatatatttatctaacaattctttaattactaaacgctagctttatctagccagggattcaaaactggtgttttaagccaaggagtgtgctggtgtgctctttttctgtcctgggttgagtgtggagtttttggtgggaggcagagttgctaaggaaagcagtgcagtagtggataattctcttgtctcaccgcgtttccaaactatttaataaactcagttcatttctttgcactttctgggtgtacactcttatcattcagctaccatccttcatactgctatctgcactgtttcctcccctacctgccaaaaatttaatgaaattgatgacgataagaagcaataattaaattgaaagaggctgctgatagtcatattgatgatagtggttgaatcgagtacatgttgttatcctattatcaattaccatataagtaattttttgacgtgacccaatatctagtaaaaaaaaaaaaaatagtggcagtatgagtaaatatcttccttgttaaaaataaaaccagtatacgtatgattgtgaaaacctgcaaactgtgattacattaaccaggatgcaatggggaagttgtcttaaactgaggcccatttattttatgcacatacttatgagaattacttgggccttcattcgtgctagggaggacggcaccgtgccaaggtaaggttccgttgtttatccaaggccataaatctaggcctgtgagagtccgtgcttagcactgcctggttcagctgaatgagaggctgcccatgtggtgacggctgccaggttactggtgttcaatggggttaatgggggcagccttgctactttacttcctcttccaaacaaagcaggcaccatttaaagcagtggttcccagccttggctgcacattggattcacctgagaagttttaacaactcatgcctgggtcccagcccctgggattttatttaatgggtcctgggcgcaggctggtctaaaccagccaataagcatgaaggacagaacactcacttccagaacaccaaattctccagctggcagtgtgtgcagttttagagtctaccctgaggctgaacctgatatgttccctcaggagacattggctatgctgtccccacccctgagagggtctagaccagcagttctcaatcacagctgcctattaaaatcacctgggccaggcggggtggctcacacctgtaatcccagcactttgggaggccgaggcgggaggatggcttgagctcaggagtttgagaccagcctgtccaacatggtgaaacctcgtctctactaaaaatacaaaaattagctgggtgtggtggtgcatgcctgtaatcccagctactagggaggctgaggcaggagaattgtttgaatctgggaggcggaggttgcagggagccgagatcacaccactgcactccagcatgggcaacagagcgagactccttctcaaaaaaaaaaaaaaaatcacctgagaagctttagccatcactgatgctgctgtcccagccctggggattctgatttcattggtctgaggtggggttgaggcattgggattctttttttttttttgagatggagtctcactctgtcacccaggctggagtgcagtggcgcgatctcagctcactgcaagctccgccttccaggttcacgctattctcctgcctcagcctccagagtagctgggagtacaggcgcccgccaccacgcctggctaattttgtgtgtgtgtgtgtgtgtgtgtgtgtgtgtgtgtgtgtgtgtgtgtgtttgtgtttagtagagatggagtgtcactgtgttagccaggatggtctcgatctcccgacctcatgatccgcccgcctcggcttcccaaattgctgggattacaggtgtgagccaccatgcccggccggcattgggatttttacagttcccccaggtgaatctaaggggcaacaagactgagaactatagatttaaagaaatagtaagtgctatttaaaaccaacacttaggaaaacaaatgttttcactcctttatactcctggaaaataggacagtttacaaaaggcatatgtaaaccccactccattccactcccactcacacaataaaaagacctgggtaacatatgtgttctcattagccacatatcaccaaggacattatttcttggcaaagaaactcctctgataaaatgaagagaatgtccagtttagttcctggaaacatgaagctctgtctttcacaggggtctccttggaagctgcctaaaagaagtgtctggaatgtatttcatttctagctcctctgtgtggtaatgaaagaacacaaagttgttctttgtgaaacagaaagatcagtattgaagttccagttatcaccataagcctaaggcttggtttctttatttaaaaaaaaaataggataaataatgcttccatcagggtgtagaggatgcatagaggttcatttacatggaagcacttcataaactgtgaagtgccatgcaaataagagacatgattactgtgatggccacacctcgggattaactgcactcatgatgatttcccaatgagactctgattttgtctcaagtgtcaatgaaccatttgctgttcaacaagttttgagcacctactatgtcccaggcattaggagaaggatcggggatacagcattaagacaaaccagccctccaggccggttgcagtggctcacgcctgtaatcccagcactttgggaggcagaagcagccagatcacctgaggtcgggagttcgagatcagcctgaccaacatagagaaaccccatctgtactaaaaatacaaaaaattagctgggcatggtggcgcatgcctgtaattccaggtactcagcaggctgaggcaggagaatcacttgaacctgggaggcagagattgcagtgagctgagatcgtgccattgcactccagactgagcaacaagagtgaaactccatctcagaaaaaaaaaaaaaaaaaaccagacaaaccagccctccattaatcatggagtaggggaagcagataataggcaagtaaacaaacaaaagaattgcagctgtgctaagtgctaggaaagctataaacagactagagggagctcagcctgaggccatgtggtcagaaaggcccctcagaagacacaagtccacttgaggcttgagtatgggaaggagccagccctatgagatatatgttcccccaccccaggttcatacgtggaagctttagaatgtgactgtgcatggagacaggacctttaaagaggggattaagttaaaatgaggccattagagtgggtcctaatccagtctgactggtgttcagataagaagagaacacttgggcacataaagagactctaggctgggtgtggtggctcacagctggaatcccagcactttgggaggctgaggcgggcggatcgcttaagctcaagagttcaagaccagcctgagcaacgtggcaaaaccccatctgtacataagaaatgcaaaaactagccagatgtggtggcacacacctgtagtcccagctactcaggaggctgagatggaaggatcacttgaacccaggaagcagaggtttcggtgagccaagatcgtgccactgcactccagcctgggtgatagagagagacgctgtctcaaaaacaaacaagcagactctttgggtgcaacacgtgaagacgtagggagaaggcagccatccgcaagtcaaggaggaggtctctgaagaaatcaaccctgcaggcacattgatcttggactttcagcctccagagctgtgagacaattaattagattttgttgtttacaccacccaatctgtggtgttctgttatggctgaccccacaaactaatgcagggagcaaaggccctggaccctaacacagcctcacatattccaggaactgttggaaaaccactggctagagcattaggagtgagaataagtagactggcaggaactgaggttgaaaatgtagtaaaagctagatcacgcaagagctatggggccatggcagagtgtggatttcagtgcagtgggaacttattcaaggattttaaacaaaggaataacaagatactgttcgtggagttttttaaaattttttatttggggataattttaaatttatactaaagttggctgggtacagtggcttattttccagcactttgggaggctgaagcgggcagattacctgaggtcaggagtttgagaagaccagcctggccaacatggtgaaaccctgtttctacttcaaaaaaaaaaaaaaaaaaaattagctgggcgtggtggtgcatgcctgtaatccctgctactcaggaggctgaggcagaagaatcacttgaacctgggagacagaggttgcagtgagccgaaattgtgccaccgcactccagccggggtgacaagagcaaaactccatctcaggaaaaaaaaaaatgtatactaaacttgcgaagattgtgcacagggttctcaaataccctctacccagtttccccttacctaaccatgattccactgccaaaactacagacttcattcagatttcaccagttttcccaataatgtacttttgcttctgttccagaatccagattaggacaccccattacattggttgatttatgttttaaaatgtttgctctggctgttctgtggagaattagtgaaaggcaagactggaagcagggagtccagttggtaggctattggaatgatccagaccaagatggtggtttgagctggaaagatggcagaggataaagaggggaggaagggatctattttgaaaacagagtgactttctgttagaattgatgcggggcatgagaggggaacaaaatagggatgatctcaggctttctagctctgcctagtgggcctgggtaagtggtggtgccattgccatcatgggaaacagtggaggagaagcaggttctgagaagaaaagcaagagcgccatttagtcatgatgactttcagataccaatgagactgccaagtggaaatgaggggtaagaagttggatattggccaggtgttgtggctctcacctgtaatcccagtgctctgggaggtcaaagcaggaggatcgcttgcacccaagagttcaaggccagcctgggcaacatgttgagacccccatctctacaaaaaaaaaaaaaaatttaattagctggacatggtggcacacacctgtcatcccagctactcaggaggctgaggtgggaggatcgcttgagcccaggcagtcaaggctgcagtgaaccatgatcaagccaccatactccagcctgggcaacagagcgagactctgtctcaaaagaagaagaagaagaagttgcatatgcatatgaatctggcattcagagagggatgtgggtcatgatttttatctagggagaggagtgacagaaaagagaagtttctagatgctccgagatagagattgcccaggtcctaagaaggaccttctgatggcttccaggtccagcttctcgttgttatctttattccttggttaagactaattttcaatcactgggctgtgcttggttttaggaaataaacgatctcattaatttaaccacaaagatttacttagagagatctaatttctccccctgggtgcctccttcgggtaaattgcataaacatctcaatgtcttgactgggctcaacttgcatggctttggagagaaatgttctcttcctgactacaagtagcttcccctggaagttaccagctgacaaagagggaattttagcatttcaggagagctgtatttattgaggcttgctatgacaatagccatcgtgaagtttgttttctttcttttttattttttgaaacggagtctcactttgtcacccaggctggagtgcagtggcgtgatctcacctcactacaatctctacctctcaggttcaaacgattctattgcctcagcctccagagtagctgggactacaggtgcgcgccaccacacccagctaatgtttatatttttagtagagacgggatttcaccatgttggccacgctgatcttgaactcctgacctcaagtgatctgcccacctcggcctcccaaagtgctgggattacaggcgtgagccaccgtgcccagccgtgaagtctgttttctaattagcacagtagtccctgcttctccgaggtttcactttctgcagttttagttccctgcagtcaaatgcagtccaaaaatattaaatggaaaattccagaaaagaataattcctaagttttaaattgcatgctgttttgaggagcaacatgaaatctcataccgtcctgccccaccccacccagggcacgaagcctccctttgtccgtcaactctgctctgtatatgctacacgcctgttagttacttagtagctgtctcggttatcacatcaaaagaaaaaaaatagagcgtgtatagagtttggtactatctgaggtctcacacatccagtgggagtctcagaatatatccccctcggccaaggtcggggacaactgcatttgtatttgtaactccaagaggacaacatagatggatggatgttaacacatttcaaaatgtactaaaattaatttgtaaagcaggagtgccagtgggaactgcagaatccatatttacaggtctctggagctgattatctcttccttaaatggcttctaattgaggattacagaaagaaaaaaagcatttgctttatttttagacgtgatctctgatgtcttcaacttttatcgttctgtttttaaccttagattattataaccagccacctacaaaatctgcaattttctctaataagtcagcacctgttaaaaaggaggttgcacaaaacactcccatttgcagtttggaaggattattatctgctttggtctgtgaagtggaaagtcaatgttcttattcaatctgtgtctaatggtgtcattttgaggacaatggaaaacagatcatgtttgattccttaagatgtggccactgctatttgtggtacaatttgtgatctgagagctgcatgtaaaaaacacatgagcaaaaagaatatccagcacacaagggctggctttctgattctcagaggtatagtgacaacacagcttacctctgcattcaaagaagctagaacttaccgcggataatcattagtagaagacagcttaaagtagtgtctgctttctggctaggcctgattcacaggtgctgtgataaattcaaaaagacctgcctcctctgatgtgctagtatcaagggtgagggagacagttaaccaaactggtcaaaagcattgtcagcaaagacctggtgctgaatcatgttgggaaactggagtttggagctagagaggcaataccaagtatcaaggtctgaatgtccactttgtaaccactgtagtaataattgactcaaaaaaaaaaaaaaagccatcaatggatgctaagaccgttgagcaaaacaagtattgggtacaggatatatcaccaccaatgctgggtgtgttagctcacacctataatctcagtactttgggaagccaaagtaggtggatcatctgagttcaggagttcgagaccagcctggccaacatggtgaaaccccatctctactaaaaatataaaaaatagccagacgtcatggcacatgcctgtaatcccagctactcgggaggctgaagcaggagaatctcttgaacccaggaggtggaggttgcagtgagctgagatcataccactgcactccagcctgggtgacagagtgagactctgtctcaaaaggaaaggaaaggaaaggaagaacaggaaaaaaaagacatgcagagaggacaaaccagaaaataatgagattggctacctacagtgggggtgtgtggaaacggggtagagatggtgagagaagcactacctctgggagtatacctttttgaatcattcaacttttgaaatcatgttaatgttttccccactcaaaaataatgaaaccaaatcaacagggattaggcagggggttggtggggtggaagatactaaaatagaattaaaacgaaataaatgaacctaactgtattttaaaagaaataaaatagccacactgaaaaggagagaaaaagacctttcccaaggaattctcaattacacagcactctgactatgtatcctcagtcggaagacaataagaattgtaaacaaatactgaattctaagtaataagtttgtttcttactgtagtatgggctaatactactgaaactattttttgtgtaatttaagtttgagcaaatacacaaccctagggcctacctgtagaagaaaatcaccatttgcaactatcataatagtaattgatttagtagtaaacatcattgaatgctaaaactagtatgtgaaaagtttgatgaggaacaggatatttacatggactaagagtatttctctgcaagtgacttactaatggaaaatggaaatagaaataattttacaatagacagccaggcacagtggctcacacctgtaatcccagcactttagcaggccgaggtgggtggatcacctgaggtcaggagttggagaccacggtgaaaccccatctctactaaaaatacaaaaagattagccgggcgtggtggtgggcacctgtaatcccagctactggggaggctgaggcaggagaatcacttgaacctgggagatggaggttgcactgagccaagaatgtgccattgcactccagcctgggcaacaagagcgaaactctgtctcaaaaaaaaaaaaagaaagaaagaaagaaagaattttacaatagacatacctggtgtataccaccttaaccaaatgtctgtaacgttatcaatcctggaacaaactagcatcagaaatgatatgatgtgctgaaaaagacgcatcacctctttagtgttcttgtcaaaaacaaacaaacaaacaaacaaacaaaaaacccataagctaaatctaatcataaggaaactttacacaaactcagattgatgggattctataaaatagctggcctgtactctccaaaattgttgaggtcatgaaagacaaagaaaggctgatgaattattttagattaaagaagactaaagagatgagactactaaatgcagtatgatcctggactggaacctaaactggagaaaaagagcccaaaggatattactgggtaatcggcaaaatttaagtagggactgaggattagataatagtattatatcaatgttaaacttcctaattttgatcgttgttttgtaatcaggtgagagactgtctttattcttaggaaattcaccctgaaatatctagaggtcaagggacatatctgcaatgttttctcaaatgtgaaagacaaagcaaaagaagcaaatgttaacggctggagaatctgggtaaagggtgttcagggattttctgatatttcttgattttttttatattcttgcaattttttgacatgtttgacattatattaagatttaaagtcacaattatttattgatttaaaaatttttttgggagacagggtcttgctgtgtcacccaggctggagtgcagtggcaccatcacggcgtactgcagcctcaacctcctgggctgaagcaatcctcccacctcagccttcttagtagctgggactacaggagcacatcaccatgcccagctaattttttttttttttttgtagagatgggcatctcgctgtgttgcccatgctggtcttgaactcctgggctcgaatgatcctcccaccccagcctcccaaagtgctggcattataggagtgagtcaccacacccagcgcaatgattttttaaaattaaaattgaaagagcaaaaaatggtataaggaatgtaactaaagataaaagaattttgttataggcagacagtgtgtctaaactgaaaacctaagagaatttacaaattatcttaaatagaatactaaatagttaaaatgatagcaaaatgattatgttcagaagggttactggctatcagatcaacttacaaatatcaatgatattccatatatgagtaataattagaaaatattaatcccatcatcaatagcaacataacattaaggtacccaagaacaaatctaacttttctagacgaaattattatcaaaggacctaacaaagacctgaacaaattataaatactccatgtgcatggagcaaaagactaaatactgtaaagaaataagtgatttcctaaatcagtctccaaattaaatgtaattccaatcaacatctcaacaggattgtcataaattgtaaaatcagatggaaaaataaaagtcaaaagatagctgagacaaattttgaacaaagaacaaggaggcgaagttcatcatatctgataacaaaatcatatgaaagaatgtggtatttgcacaaagatagaaataaacgtaagctgatcatgtgaatttgatacataatagataatgtgtctccaatcagtgggaaggaaagataactttctcagtaaatgacattaagtgagttgacatttcatagggaaaactaaaataataggctggacacagtggctcatgcctgtaatcccagcactttgggaggccaaggcaagaggatcacttgagtccaggagttcaaggccagcctgggcaacatagctagaccccatctctgcaaacaataaaaataattagccaggcatggtgatgtaggcctgtagctccagctacttgtgagactgaggcaggaggatcacttgagcctgggaggtcaaaactgcagtgagtcatgatggcgctactacacttccatctgggcaacagagaaagaccctgtctcaagaaaaaaagaaagaaaagaatggatccctacctcactccatattcaaaaataaattccaaaagtgtttacaaacctgaccatggaaaccattaaaatcatttaagaatatcttatttatggatgcagatgcatttatatgttacataaaatacaaagtttattttaaaatgtggactaagttcacaataaatttatgatagctgtcagccaggtgtggaagaggaagggatttcaactataagtgtgaaattttctcttttttttttttttaagtagggacagaatcggaatcaaatatgacaaaataattacatatgtttgactggtgggtagtggctgttttttggctttttgattttttgttttgttttcttttttagatggagtcaccctttgtcacccaggctggagtgcagtggtgtgatcttggctcactgaacctctgcctccagggttcaagcgactctcctgcctcagcctcccaagtagctgggattataggtgcatgccaccacactatgctaatttttacatttttagtagagacgaggtttcaccgtgttggccaggctggtctcaaactcctgggctcaagcaatctgccctccttgaccttctaaagtgctgagattacaggcgtgagccatgttttttatatgattttttatattcttgatattgatcttttgagttttgaaaaagaaaatattcatctgagtcttctgttccatgaaactcaaacctctttaattctttgtgatccactgttagcctcagtcactggctctgcagttgtttcccaaatgtttggctccttttccccctcataattactgtgggaatacagtgtacgtcacttaaaaaaaataaggcacagctttgctgtttatttacctagagctttgtgtttatgtttgttgagtccagtggatggtgccttggtgggtggattgctcatgacagaggatggacagcaatcttgggtcgtggagcattttggtggagaacacttgaggaatctgccaaaagctagcagctggtcaggcccagttagtaggattctgtactagaatcagagaaatcaccagccttcgaccaaatagggtccaaagcagggctctgcagccaagtgataacgggacttcgctgttctgaacttccccagctgtgtaaaggggaaaatggcacccacttcagagagaattgagaggatgcagtgagatgctgcatgtcaaatgcttcataaaccatagttctcttttctctttcacttcagttatacctcatgggaaccacttcagagtggactcttggagatccacaaatggggaagtcagtgtaacttggggagtccaagttctcacgtttctgaagtctgcagtccctattcctttttcaccacccagaggcatcctcagacatgagttgataagtcacgtctccagggacttttgagttcactttttcaaagtggagaaaggagtggttactggtgcaagcagcagaccctctgccttgtggcctcctgcttggaggttggggattctggtttcagacacagtccttccttgggttttactcatctgtaagggatcctgcttggcacagctctgttccaagaggtgagagccatctatgctgttgttcccagttaatcatcaacagaaccgtggcagaatggagacaggatgaagactgtaggcactagagtcaaaccaggtgtctttgaatcccaagtcaactccttagcagctagttaagtcatgttacttcacttccgtgtgcccctgtcaaatgagtatcatgatagttcccactcatagggtacttgtgaggattaaatgtgttaagcctgaaaagtgcacagaatagagctttgtacacattttagacattcagcatgttttaacacggccattgtttttcatgttttaacaactttacaaatgaaacgcatattagagttgatggcatgttacaattacaagtggcagcattttttctttttcggtggtatagttggtggcatcttagaatcaatgaattaattcagcatgatatctccttttgcataggatattgagatgtacatcatgagtgcatttcagtactgaatagtgtttgcatatcaaatgtgaacactgaactgaattctgccaaagtcaagtcattgaataataagctattcagttgttcaggcctggaaggttgtttgttaactttttccagggcactggctggcttcctaataatgcaaatgacttgatagaactctgaaaagggaaccattgaatcttcttccccttggacatccagagccatcatctttataaaatggatttcttactaaaaatccctggatgccatctatctgatacaccttcaaggacaaagtctcagctagtattttagtttttttttttttttaatgtggggcaaggggataataggagctgagcttacagaaaagaagttaatgatttccaatggacatgatttcaaagcaatttctgccttttgatgcgctgaaatcattgcttccatctgctcccctacttgtacacagggctctgctttttaaccatgcagtgtgtcagctgttgcccaccaaattctgcacttgatcttctgagactgatggcgattctctatgaataatattaagctattaaatcacatttaaatcctatttctccactaatacctattgaaggcctgtttatattccatcagatttttatggccatttggtacataaatttgttaaatataaacttcatggagcttcatctgaaaatgtttcatcttgttcccagtcctgtaaagacatggtcataaatacctttggactatgcaaaccattatctagagtaattttaattatctttagctatgccgatcagatgataataaatagatgttgaaaagcatcagcaaaatgccatcatggaagagatactcaggggtaaaaccaaataattgaccatttggtgctgaaacattttattatcattcctacaaaggttcagaaatctatcatgagattgggtttgttatgaactcaacatcaccttggttgggatgtcaaaactagagtaaattattgaaatgaaatatgaaacatattaaggaacgtcctcgggaatgaaggacactggaaagactgaattttctagtaacttaatttcgatctatgggtgaagctttgttttcagcacccagctatatttgcttggaaccatctgggtctcttggaatagataatgttaaaccagatacactagttgtacacgtggtatgtctttattgggggcttttggtaacagtttaagatagaaaaaaaagtattgctttaaaaaaaaagtgatccttggtactcacgggtaacaacattctgctttggctaagagtttacgtaactgcatactgttccctatttctttgttgttgttgttgttttgtatttttgttgttattgtttttcttttgagatagagtctcgctctgtcgtccaggctggagtgcagtggcccgatctcggctcactgcaacctctgcctcctaggttcaatcgattctcctgcctcggcctcctgagtagctgggattacaggtgtgagccaccacgcctggcttgagagatggaagatcagactcgatttgctcatgttgttcctaacctttattctaaactgataaaaatgtaaagtcatctgatttcaagactgattgttcccttgggtgttccttaattccctagaggccgagtaaattcttatggtttaaaggctcttcccccttgcttttctatactcccttgggtttgtttttaaaatgatagtgttctgaaccaatttttttttttctttttgagacagagtcttcctctatcacccaggccgtagagcagtggcacaatttcagctcactgcaacctccacctcctgggctcaagtgatcttctcacctcagcctcccaagtaactgggactataggcacttgccaccatgctcgcctaattttttaattttttgtagagatgaagtcttcctatattacccaggctgatcttgaacccctgggctcaagtgatgcccccaccttggcctcccaaactgctgggattataggcatgagccaccatgcctggccccaaataatttatataagccatttatcatagttcctgacatatcatagatgttcagtaaatatcaattatcttcctcaggctgagcatggtggctcacgcctgtaatccccgcactttgggaggccaaagtgggtatcttacttgaagtcaggaattcgagaccagcctggccaacatggcaaaaccccatctccactaaaaatacaaaaattagccaggcgcggtggcacacacctgtaatcacagctactcaggaggctgaggcaggagaatcacttgaatacgggaggtggaggttgcagtgagctgagatcatgctgctgtactccagcctaggcgacagagtgattgagactccatctcaacaaaaaaaggaaagaaaaaaacagttatcttcctcaatccctttgtgttaagttcctagtggaaatttgagaagtcctttattttacatttaaaagataggatgcttttaatggtgccttaattcatcgtacaagaaacatttgttaaacatctattcggcaccaggggttgttaggctggtggaagggacaggtactctcattgcaaggcagtggggtaggctctatggagaacacatgctagagggtgagaatgggtagacaggcaagatcgtgatgcagggagagactggtagagaacacaggagatttttgcagtagatcagatgatagagaatgcagcccgagatttaaagcagtgacagtagaaatagagaggagacgctgggtgcggtggctcatgcctgtaatcccagcactttgggaggccgaggcaggcggatcacgaggtcaggagatcaagaccatcctggccaacgtggtgaaaccccgtctctactaaaaatacaaaaattagctgggagtagtggtgcgtgcccgtaattccagctacttgggaggctgaggcaggagaatcgcttgaaccagggagtcggaggttgcagtgagccaagatcacgccactgcactccagcctgagagtgatctccagcactccagagtgagactccgtctcaaaaaaagaaaagaaaagaaaagaaatatagaggagagaattaggaagacagagagagattggtgcctagttaggatggagcaattggctcagtggtctgagataattcaggtttttgtaacgaatgggtgttcgtgctaccaactaaggcgaggaattttttttaagtggtttaggagatgccatggtgcccctcacccccaaattcctatgttaaaatcctaatcaccgcaaggtgatggcattaggaggtgaggcctttgaaggtgcttaggtcttaagggccccagagagaccccttaggttttaagggccccagatagaccccttgtcccttctaccatgtgaggacacaactagaagttgctatctgcccaggcatggtggcttatacctgtaatcctagcactttgggaggccaaggcaggcagatcatctgaggtcaggagttcatgaccagcctggccaacatggtgaaaccccgtctctacaaaaaaatacaaaaaaattagctgggcatggtggtgggcacctgtaatcccagctacttgggaagctgaggcaggagaattgcttgaacctgagaggtggaggttgcagtgagccgagatcacgccattgcactccagcctgggtgacaagagtgaaactccatctcaaaaaaacagaaagaaggtgctatctatgatccaggaagtgggtcctcacctgatgccaaatctgcctcgatcttggacttctcagcccccaaaactataagaaatacatatatatatatatatatatatatatatatatattttttttttttttttttttaccatgttggccaggctggtcttgaactcctgacttcaggtgatccatccaccttggcctcccagagtgctgggattacaggcaagagccactgtgcctggctaagaaataaatttcttttgttcacacactacccagtttatggcattttttaatagcagcccaaacagactgagacacgtgaggttgatgaattcagtttttgtccagttgagtttgaagtagtcacggaaaacttagtgaaataaccggtagggaatttggtatataaatccaaagccgagacctagagatacagatttggaagtcataaacgtagttttgaaagcatgagaacagaggatattacccaaaggatacatgagggataaaatgaaaagaagggcaaggatggaacctgggggaatattgacgtttaatgggagggaaatggaagagcatctcatagagatggatgagaaaggagcactctgagagttaggagaatcgggatgcctgggagtcacaaaggcccaggaaagtgagaacaccaaggaagaaattgtcaccagtaacagcaacagagttccgtgaacacagaatttaaaaggtcctgtgagaatgagcaataaggtcactggtgacctttatgaaaacgagagacatggtggagttagaagccagcttgtagtatcctttgatgcttggctgtagaaggaaggaaaagaattggatcagaaggggacttagagtggaagggagaagcctttgcaagatttcccatctctgtggaaaagaagttcatgttcgggtgtatctcctctgttccaaacgcatagcagtgacagataaaatacaaagagagaaagccaaagtgatattgctggactcgtggatcaaaaactcggaaggatgagggtagcctggattgactggaatctgggtcttggggtcaggcaggtattgatgtaggtcttttatggcaataggactaaaagtactcaatgcaagctgggccaccagagccagggtcactgtttgaaaaaagaggctggaggtaggcctccccaccctcttttcattctttcaggtgaaaggaacctgaaaagaatcccctgtgtctgatgcctgggccatggcttacagtagtagttctgctcttagaaggcaactgtaaaacctagagattggtgtgaggagtcagggagtggaggtggagaaaaaaaagcagcaacagtgacaataacaacaaagcctcccactcaaaaacgaccccgcaaatctaacattaatgaagacagccaaggtatcaacagtcagaatgtaaatctactgccgaagaaaataactttgtagacagacctgattaaaatagtatattcgggctgctcagagggaaaagtaaaggaataatgttcattttaaaagaatgagaaattaggaaccaaaaaagaaacaagaacagaggatttgaaaaagaaccagtttgaaattcagggactgaatcattgaaatgaaatctaagtggatcagataaactaggctagatacaactgaagagataattagtgaattggaagatattaatagtattgagaaatacaacccatttcatagcacagaaatacaaagaattttttaaatacatagttaaattagggagaaagaatgagaattgccatatagctaactcataggagcagaaaaatattaagggttggtgcaaaagtaattgcgatttttgccattagttttaatgcaattacttttgcaccaacctaatatttttctgctcctatgagttagctatatggcaatctcattgcttgcnnnnnnnnnnnnnnnnnnnncgtccctctctccgggtgggggggccgggggggggggggggggggggggtggtaggggggggggggggggggggggggggggtggggggggcgcggggggggggggggggggggggggcgtcaaccatacaatggaggaaataacagaaaagcaatatttgaaacaataaaggctgagaattttctagaattgaagagagacataaatccttacatcaacgtatatttgagtaataacaataatggtaaacacttatttagcccttatgttccagaccctcttctatatgctttctatgtattaactcattaatcctctaatatcccttggataagagtaatttacatgtgagtaaactggaaaagagagaatgtgtgtagtttgcccaaggtcacacaactgggtggtgggatttcaccccaagcagcctggataccctctaatacttctctaaatcctaaagggattaaaaataaatctatacctggacacattgtcatgaaactgcagattatcaaagatttttttttaagagctcctctagaggaaagacagatcacgtacaaagggacaatcctcatcctaatagtggacttctcattagcaacagctggtcaatgaagacaatgaaaggagagattctaaaacccagggcaaggcatagaacacaagaaacaaatgtgggcctatcaaatgatacaatgttatacattaacttaactgtgaaatactgaggaaggagctggtaggccagtgagtttggagttacaagaggaagagcagctgggcaccccgtggctcatccctgtaatctcagcactgtgggaggctggagaaggaggatcactttatcccaggaactcaagaccagcctggacaacatagtgagaccccatctctacaaaaaaaaaattaaaaaatttggcaagcatggtggtgcgtgcctatagtcccagctacttgggaggctgaggtgggaggatcacttgagcccaagaggttgaggctgcagtgagccatgattgcgccactgcactctagtctgggtgacagagcaagaccctgtctcaaaaagaaaaaggagggaaagaaaataagaggaagagcctgcccccgggaagccagaaagtgaatggtcttcgtgaacctctgaaatagaaggaaaagcagggcaggcaaggagggggagaaggggcagagagtgacgagcacacgcagaaggtctctagtttccagtaatatgggaagaaaggtcatctcctgtaaaggaaggggtcaggaaagagggggctgaaggagggtaataaaggtcaaagataacctttatgggaaatggatgagaagcgtcaaaggattgcttgaaagtcttggcagtgtggtgatttgggaaatgttgaatgagtggtaccatcagcctacataattgtggcgttttcccagctgtgctttgcagcctgcgtgtaggagcacaggaaatggttgaattgattcaggatttgtcttcagggtaggttcagcaaagtatggaaaaattgagcaagtgaaggtcaaaatgagctttggagtccagtgaagactcttgggaattggagagcttggtgaggtcaaggagaaagtgtcctgggagtgagagtaagagaatacaggttggggttggagcaaaagtaactagagctttcagatttcagaagtggaataattccaggagattcaagaccccagtggagcttgaagggaagtggttagaggtggaatggaggtgaaggtcgttggaggagaaggaaaggaaaaggaatgaggaggctgggcctatagtgttgatgggctgcccatgtggacactgaaatcataaagatgtggatataaagtagggtaaagtggaatcctgggcatggtccagagagttcatgaagccaggggtcaggtggtctgtaaataacagcagtcatcatcaatcaccaatgaggcgtgtggctagaaagcaggggcctggaggaggagggccctggaaaagtgccactcattctacaagtgaccactaaccttgggaatttttttttggtggttggggggatggatcttgctctgtcgcccaggttagagtgcagtggtacaaccttggttcactgcaacctcgacctcctggactcaggtgatcctcctacctcagtctcccaagtagctggaactacaggtgcataccaccatgcccagctaattttgatattttttttttgtagagatggggttttgccatgtttcccaggctggtctccaactcctgggctcaagtgatcctcttgcctcaccctcccgtagtgctgggattacaagcatgagctaccacaccaggcccctgggtcacctcttacaccagagccagtgggttcatttgatcaatctgagcagtactcacaggattcaattgtcttctcacaccttttccccaggtttcaaagtcagagccacttgctgacttgagtgattatggcagggccccatctaatggcctttttgcaaagtacagctggagcaagcaggctcgcctgtgccccttttctcatcaaaagcaaggcaaagagggtatagattagactagcaggccccggctaggaagtaacatcttcaagagtaaagaagtaatcatgatggcagccatgtggatattgactcataataatggtgatggtcagacggatattggcaggaatatttacatgagcccagcatcttgccaacctgtctttagatagccacagtctcatgaaatcttcacagatattaatatccccattttacaactgacactgaggcttagtgagagccagcggtctgcacagcctcacagctagcaagtgtcagatctaggactcaattctaggttagtttagccttggagcacgtgctctcatgtaactaatctgctgtctttggctctaaaaatgaaataagactgtaggtagagccaggcgcggtggctcacacctgtaatcccaacactttgggaggctgaggcggacgaatcatttgaggtcaggagtttgagaccagcctggccaacaaggtgaaaccctgtctctactaaaaatacaaaaattagctgggcttggtggtgcatgcttgtaatcccagctgcttgggaggctgaggcaggagaatcacttgaaccagggaggcagaggctgcagtaagccaagatccaagatggtgccactgctccaacctgggcaacagaacgagactctgtctcatagatttaaaaaaaaaaaaaaaactgtacatggagtcagctgctctaaagtctggttgaaagtttaaattttcacagtgaggaaagggaaataagtcactcccatcttaaagaagcattgtcaaaggaatatttttctccttccaagttttacagggaggcaaatattctgaaaggaattatcgtggtaataacatcccttacctgatttttttcaaaaacttttattactaggaattttctcagatgtaatgccgtataatgggtgtttatcaactggaatagtgagggaaaatggctttccagccatgtgtctagtttttacacatcttcagacatggatggaaggcagagctgggtcgcctcaattctgggtcaagtcagcttcccctggattagaaggggaggctggtaggctaatagcaggatgctggtgacatatgaaggaggggttgtttcttatgaaagcagattctcagagaaagaggatctgcgtaggaacaccagagagattggcctcaaagacccaaaagcaaaagaaataagttaaaaataaaacagtcctaggccaggcacggtcactcacgcctgtaatcccaacactttgggaggcccaggcgggtggatagcttgaggtcaggagttcgagaccagccttgccaacatggtgaaaccccatttttactgaaaatacaaaaattagccaggcgtgaaagcatgtacctgtagtcccagctacttgggaagctgaggcacaagaatcacttgaacccaggaggcggaggttgcagtgtgctgagaacttgccactgcactccagcctggacaacagagtgagactccctctccaaaaaaaattaaaatatgactgggcatggctcacatctgtaatcccagcactttgggaggctgaggcggacggatcacctgaggccaggagtttgagaccagcctggccaacatcatgaagccccatctctactaaaaataaaaaattagctgggtgcgttgggatgcgcctgtagtcccagttactcaggaggctgaggcaggagaatcgtttgaaaccgggaagcagaggttgcagtgagccgaaatcgcgccattgcactccagccagggcaacagggtgagattctgtctcaaaataaaataaaataaaacaaaacaataaaataaaataaaacaaggctaatgataaacccaggggctccttggcaggagcaaagctgaaccgagagctctattcctagagccctatgtctgaataatttatttttcctatctcatagtccctatgtgccttcctcagctgagatcaagtgccaaaggacatctcaaaatacccacagccaaaacttctcagcatagctccctgcatggagaaggagacagctctgcaagtctttgtcctgaaccgtttacggattttccatggtctgcaagaccttggactcacgccgcctgccagctggcagccgctgtccagcctgggaacagagcttgctccggcctgtggcgagtcctcccggggcttatcgtgaatttccccggttttgcatcttcatcctgaaaacctcccgacctttccttaatgaagattttagctgggggaaattgcattagtggctcgtgtttttctgtcaaccttctaaattatgttagttgtaagtaaaaagagtacagtaagtccttttatccgttgtgggctgttcctgggaatcataatggacaataaaataataagtaatggacaggaagatgctcttagaaccagttcggaaaactcttccagtgccagacagaaaccagccacctgcgccgttatcaggacatcaagtgaagccagtaaacacttgtggagctccttttaagtcccagcaccaaagaataatacctaacacttctagttaagagagcatcgtactgagtattatctcagttaatattcataacagcacataagttcaatgctcagtttgcagatgagggaactgtggttgagagatgtttttaatacactgcccaaggccacacaatgaatagctgacaaaactgagatctggggtcttttgattgtgtgtctttctctctccacactccacctcagctgctcagaagcagatcctggggccagaatggacctctgtaggaagcctcagagatggaagctttctgccctcaactggctgactgaattgatggaacagtgggtgataagcgagggaattatttcgtagtttggttgaaaaaaagtcttcagcatgtaaatatgtcttacataagtcatgaaaaatgggactgaaagaaatgagagacaagagggaaaagacagaagtattttctttatcaaaccttggggaaaagcatcttttcctcaaatacccaatgcagtatgtatggtttttgttgttattattaagacaagggaccctttttttacccagacccaaattcaactgccttcaaagagatgggacaatgttcttagagagtgaagtttcgcactgaaaaccagcttttccaaagagctccaaagagcacgtttaaattcggctaagtcggagacgtttgcagatgcaggcctgagacccctggcccacacttggatgacgaggcgtaaagtgaggaccctttgcctgtaaggctgtgtctccatctcagaaacctatttaaagccgaactttataatggaaacacagccacaacctgctatcagcaaccacgatattaaacaggcatagagccaatagcagtggcgtgaagccagcgaggaaagattagcatcacaagtaagagattttaggctcagggccagaagagggtttttttttttcttcttccctttttattaaaaaataataataaaaagggagagagaaagaaataaaaagaggtggaaaggtgcaaaagaattcctgtttagccaccctccctgagattgttctccttggttatccagataagtacagaaacaaaccactgcctgtctgaaaacctggcagtcgcttgaccttaaaatggtctctgcaataacccttccaacctgctccgctctcctgtccttggctggcccatgtgcagaatggagcgtgtgacctccagcacggggaaagtaataatcagtaaggttcatattttccacttggagttagaggaaagaccatgtgagcacaactttgggttgctatctttttgccctgcgctgctgtaggaagagacatgcagtggttggaagtctccctactggcagagcgtcgttccagcacccagtttgactttgtgcaagatggtgcttttctgactacctcctccctttaagctgcagccttctgaaatctcagctttcaggaaaggatgccagccccaggagttataggatgcagcagagcaaaggtggcattttccaggtgagcttcgggactgccccccttgggctctcccatccaggccatgcagtgctgactgcccatagcttgaccgctgcagatggacagggggtgctctgttgtaagcaactctcagaggctaagtgacgtgctcaatcttgctgcttgctccaaaccagcacaagattttttgtagccttcttttacacttcttatttggaaaatttcaaacctacagagaagtttgtaagaagagtgcagtgattctggattcaccaattgttaacatttttctccatttgctttgtctcttcctctccatacatatttacatcatttcccccaaccccccagaaccctttgagagtcatatacagacatcatgactccttaacttttttttctttcttttttttttttttgagatggagtttcactcttgttgctcaggctggagtgcaatgctgtgacctcggctcactgcaacctctgcctcccgggttcaagcgattctcctgcctcagcttcccgagtacctgggattataggcgcccgccaccatgcccagctaaatttttgtatttttagtagagatggggtttcaccctgttggccaggctagtctcaaactcttgacctcaggcgattcacccacctcggcctcccaaattgctgggattacaggcatgagccaccggccccggcctgaccctttacccttgaatacttcattgcgccctaagaacaagggctttcccttacgtaaccatcgtgcagtgcttaggttctggaagcttaacattgatacaatactattatctgatagagaggcatatttacatcttgccgattatcgcaaaatgttttttcaatagcaaacaaaaactttaagaaattactaaatgtcaattaaaaaaaaaaaacaaaaaaaaacaaaaaaaaaaaaccacttcctaacttgcctagctactcaggaggctgaggcaggagaatggcctgagcccatgtgttcaagtccaacctgagcaacatagtgagattctatctcttaaaagttaaatcagtaaataaataaacattcatgattcatgttccagtagaggctcacacattgcatttaattgtcactttctttagtctcctctttaatctggagctgtttctcagcttttttttttttttttgagacagagtttcactcctgttgcccagtctggagtgcaatggtgcgatctgagctcactgcaacctccacctcttgagctccagcaatcctcccacctcagcctcccgagcagctgggactacaggcatgcaccgtcacacctgtctagtttttctagttttttttttttttttttgtagaaatgaagtcttgctatgttgcccaggctggtctcaaactcctgggctcaagtgatgtgcctttctcagcctcccaaagcgttgggaggcatgaaccatcacgcccggcctgtttctcagcttttctttgtctctcgtgacactgacattttgcagaacactggctggttttgtgcatgtccttgttgctgggttttccccattgtgttctcatgattagattcagactgtgcatctttggcaggaattctgtattagcaatactgagtcattgtggactttcagaatatcctttccccaacatgcatggcttccctgtgattttatttatttatttatttatttttattttttgtagagacagggtcttcctatgttgcccaggctggtctcgaactcttgggctcaaactatcctcctgcctcagcctcccgaagtgctgggaacacaggcatgagccactgtgcacagccttccctgtattttattttctggcctttgagaagactttagcctcccctggtttcccaagctgtgttcatcacagagctggtgtcggaggcctggtgggagagttggtcatgttcttcttcttcttcctttttttttttttttttttgagacagagtctcactcttgttgcccaggccgggtgcaatggcgcaatctcggcttactgcaacctctgcctcccgggttcaagtgattctcctgcctcagcctcccaagtagctgggattacaggcatgcgccaccatgcccggctaacttttgtattcttaatagagacgggatttcaccatgttggccaggctggtctcgaactcatgacctcaggtaatccgcccacctcagactcccaaagtcctgggtttataggcgtgaaccaccgcacccagccagtcatgttcttctaagcactggagaaaaaaggacagctgcctgtgctgaaaagtcaccccaagagagagcaggaagaatcccaaagcagaggcgacagtggactctttctatcctgtgctctgagtccggcaaactgttgatgaagccctcacggggtcattcacagcagaattggatctggttagatccaattccaaaaaaaaaaaaagccacatcccttggatccaggtttgctttttgtacccaagcttgggcattccatttggatggttttacctcttaaatattacatccatcctacttctccattccggctaccatggccctagttaaggtgtttatttcttttctagagcaatctcacactaaacccatatctcccacagagctatctgcccagggaatccacgtagacttcaaatctgatcattttcacagtgactggcacccaagaccttctgtcgcccggccactactttcctctgtcgttccgctattccatgctccctgcctcaaacataatatgcccaaaatatcaggtcaggatacgagagtgttaagtgccagcattacctgggagcttgttaggatctcaggccccaccctagacccactgaatcggaacctgaatctaagcaagcaagatttcccaggtgttgtgtgcgcatgaaagcaccggaggcactatctagaacctgctggaagggcctgttctgtgcaaggaacttaagctgcccctcaggctctgtggtccttggcactgaggcaagattctcaaaataatctctgattcaagggattccgctccgaaaattacattggaaattgtttttcctaatttgcataaataaataaacttagtaaatgggcttcatctgatttttacttttttctcttacaaattcttttctaaactttgggccaggcgtggtgccggcacacatcagcattttgggaggctgaagccagcagatcaccttgaggtcaggagttaaagaccagcctggtcaacatggcaagaccctgtctctactaaaaatacaaacattagccgggcgtggtggctcacgcctgtaatcacagcactttgggaggccgaggtgggcggatcacaaggtcaagagattgagaccatcctggccaacatggtgaaaccctatctctaccaaaaatacaaaaactagctgggcactggggcatgcgcctgtagtcccagctactcgggaggctgaggcaggagaatcgtttgaacccgaggggcggaggttgcagtgagccgagattgcgccactgcactccagcctggcgacagggtgagactctgtctcaaaaaaaaaaaaaaagaaaaagaaaagaaaaaaatattattttctaaactttgacatctgctgctacttgttggctaacaagatgtcatctgctggcaaacaaaatgagtaaactactaggaaataaatggtaatgttaaaattcaacatacctggtgttcagtctaacagttcagttcaacaacagcaaaaaataaaaattaaaactttgagtgttaagcttctattaatgtatgagatactagaagaaggtctgagggatgcatagatgaatgagatatattgtatagcttattccccatgactgtaaggccacatgtgcctgtagtactggggcactgaatggtacttcagcaatgaccatccttttattagaatccttgggatgctactagtctggatttgcagaattcaccaaaatgaatgacttttgctattacctgtcaagttgatttcatcttctgtgtccagacagctatccaaaccaatataaccaggaaatttactctggattcctcagatcaatagatgaatggttttgttgttgttttgttgttgtttgagacggagttttgttcttgttgccctggttgcccaggctggagtgcagtggcgtgacctcagctcaccgcaacctccgcctcctgggttcaagcaattctcctgcctcagcctcccgagtagctgggattacaggcatgtgccaccaccacacccagctaattttgtatttttagtagagacggggtttctccatgttgatcaggctggtcttgaacccccgacctcaggtgttccacccacctcagccttccaaagtgctgggattacaggcatgagccacccggccaatgaatggtttttaaaacaaaaatcacaatgagcctgttgccttttattggctttggttttaggaggagaaactttaaaagcttggagttgaaggataatggttcaacctttcttggcgtgtaagtgatttatgacctcctaatttaacgaaagtaacaacagcgaagacaagccacttattagcgtttcctggcaattccatcagggagataggggttggggccttgagagcccaagaattaaacaacagctgaatgttattcaaaatctaaattcattatacacattgttgctttactaaaatctttactaaaatgtgatcaagaaagccttggcagggcacggtcttgaaagatgagtaccaactcatcttgggcaggcagatatcttgccaggcagatagggtggggagagccttcagggcaagggaggagcaagggcaagagtcttgaaggctgaagagtgagcaggatgtggagaggaagtttcaggctccacagggtcatgggggcaggcccagagcaaggaagagagaaaggagggtgatccagggaggtgagttgatgagaggaggcagatgtactaagtccatacatgagtgcagtatttgacagtttgcaaagcaccttcatacccactatctcaccaggtcctgctagctcagtgatgaggtgggacacctaacgtcctcacttccaggtgatgaaatggaggcctggaggagtttctaaagtcgtacaactcctaagtggtggagccaggattagaatgagatattttgacctctggacactgctctttccaccataaactgatatgttccaggagcattgaagaaagcttcctagcatattgggaagaaaactcatggttggggtgtggctgggtggatggatgggcggatggatggatggatggatggatggatggatggatggatggatggatggatggatcaatgggtggatgtggagatcagagtctcaagagaaaaagagttaagagtccagcagttgtgcaggtgagatgggggattcaaacgtctatcaggaaggtggatttgtgagatacagaggcagtggagtgaatagaacttcatgtctgaccacatgtgagaatgagaaagaaataagagtgtaatggccggacacagtggttcaggcctataatcacagcacttcgggaggctgaggtgggcagatcacctgaggtcgggagtttgagactagcctgaccaatgtggagaaaccctgtctctactaaaaatacaaaaaattagctgggagtggtggcgcatgcctgtaatcccagctactcaggatgctgaggcaggagaatcacttgaacccaggaggcagtggttgcggtgagccgagatcacgccattgcactccagcctgggcagcaagagcgatcaaaaaaagaaataagaatgtaggataacacccaagttttgaccttggatgattaaaggaccacaaaggaaaacaaacttaaaccttacagccaaagtggtaaaggtagagatgatgaatgttaacttcgaatatgtctaatagtcagttgatatcaatggatctggaattcaggaaaagtgtctgagatatccaggagattcattaggtcatcagcgatcaaaggttagcattttattatagatgttcactgtgttattataaataacgttaaaaaagagaaaaataaaaaggaaaggtcttaaacatgtaacagttgcagattggctcatttatgttacagccatatattgaaatgcaattcagaccttaaaaatgagtgctggctttgggaggccaaagtgggcagattacttgaggtcaagagtttgaggccagcctggtcaacatggtgaaacctcatctctaccaaaatacaaaaattaaccaggtgtagtggcatgtgtctgtaatcccagctgcttaggaggctgagtgaggcaggagaattgcttgaacccaagaggcagaggttgcagtgagctgagatggtaccactgcactccagcctgggcaacagagtgagactccgtctcaaaaaaaaaaaaaaaggagtgctggtttaggaggtcaatgctggaggatcacttgagcccaggagttcgaaaccagtctgggcaacatggcaaaaccctatctctacaaaaaaaaaaaaaaaaaaaaaaaaaagtagcctatattcccagcaactcaggagaccgaggtgggaggatcacctgagcctagggaggttgaggctacagtgacccatgatcgcgccactgcactccagcctgagcaacagaacaagactctgtctcaaaaaaaaagaaaagaaaagaaaaagaaaaaagagcgctaggcttgtgggtgctttcccttccttggtgatactaacatctgtcgctggcagggcacttcccagcccagatcaaaatgaagtgggctttccctactttatgtcctcagatcttctctactacccagtgagggacgaactgacactttattacggaatcacagatgagattccagaataaagattctttattctttccaaaataaagaagtagtatgattgtgataagaaaaaaggagaaaagaaaatgttattaaaaaaattggccaggcacggtggttcacgcctataatcccagcactttgggaggccaaggtggggagttttgcttgagctcatgagctcgagatcagcctgagcaacatagtgaaaccgcatctctactaagaatacaaaaattagccaggtgtggtggcacatggctgtagtcccagctactcgggaggctgagggaggagaatcgcttgaacctgggaggcagaggctggagtgagctgagattgccccactgcactccagcctgggcaacagagtgagactccgtctcaaaaaaaaaaaaaataaatatataaaataaataaaaataaattaaaaatgacatcacagcccaggcacaatggctcatacctgtaatcccaggactttgggaggttgaggcaggaggacagcttgagccccaggagtttgagagcagcctggggaatatagtgggaccccgtctctactaaaaaaaaaaaagtttttaatgacatcacagacgccagaattgattcacgagagtatatgtgagagctggtctatgaaggcaagagtggcgggtttctccccattggggaaaaatagaaacaacaggcccacccaggggcctcatacctaattctaccacaaccctgggaagggctctggaagccaaaccctccccacatgctagccccagcctgtcttacccgtgcctggagggttccttctggagtcttctgggcagctgccctggggagcaggggcccgtggagctcagccaggaggccttgcgtagtttgccttgggaggttattacagccaatccacatagatgcgaaaaccaaaccaaacacagcctaccaggaacaagtaacgatttgttcctttcttttgctttttctgacagtagatgcaatctatcgtgattcttaagtgtttttgggctagtgcccattccattgtttttgcccagagaggctcaccaggaatgagctggaaggagacacaagcccctaagtacctcgggacgcttgcttggtgaacaagaggaggaaactcagagagcagggctgccggcctccttgtctttcgatgcctcgtgtggccaccccaccgcacgagccatagccagccatctgtctcagtatttcattctcttgaggctgagctagtgtagtggctgtgtcaggaaccctgcctgtttgtgcaaagaattcattcttccaagaaggatgaggatcaaattcacctccacatggcacacaccgaacaccgaggctgtgaaaggctggcccgtgagtgtctccaggttcaatatcgatttgtcaattgtagagaaaaccagcagttctagttcccagagaccaccctgtgaattgaaataagaaggaacggggagaaattggagctatttttaagctcagcttctgaggcttattttaggaggcattattgatcatacttcggggaaaccgttctgcgtcgctggtgccagtgtctacatgtgcacatgtgaagtgttggcctagactcctgagaccatctgtgtgcccaagggaggctgcagcccagaggagaattcggactgaggctactttgcaccaaaattaggccaaactcatgaaagggccattgttgcagctgccctgggaactgtaacttagaagtgattttgtgcccttacagcctctttagtaaatgaattgagtcatagcatttgtgatccttccgcatgtactttggtacttttctgtacttttctgtcctcttttttgtttgtttgtttgtttgttgagatggagtttcattcttgtcgcccaggctggagtgcaatggcacgatctcagctcactgcagcctcagcctcccgggttcaagcaattctcctgcctcagcctcccgggtacctgggattacaggggtgcactaccacgcccagcaaatttttgtatttttagtacaaaatgggttttaccatgttggctaggctggtctcgaactcctgacctgaggtgatccaccagccttggcctcccaaagtgctggggttacaggcatgagccaccgtgcccagcctctgtcctcttaatgagttaccatgatctagggcacctggttagaacgttgtttttccaaacagcatctttttctcatcggtcactgtatcactctgatcactgccccttgaatcttcttcctcaccctttatttcacccagatgagccagggtttaccgtatgtgggacttcaggtcatggcacaaaatggttctcaacccttttgttgagcaccggtttgctggtgctctttttagacacaaaccctggaataaacgtgccctttccctcaaagggaccccactgtggattcctatccactttgttatcctttttactcttagatctctgcctcaccactttcccaggcagcctctgctttttcatcttactgttctcattttcgcctggtgcgttcgtcagcggctttttatgttaaacttcgcagatgagccacgcctgaagttattcctgtccttctttctctccggtgtattgttgttgacaggtttttatctgttgttttgaattttctgtgacctttggggtgggcagagaaaaaaaaggacaaatgtccaccatcggccggtctgaacgccacatttaatgtgttctttttgagtgttctaacccttccttcttcctgcacacatttaataacagagaaccaaaaaaagcctagttgccttcattcatgaatatttgggacagtgaggcctcagggaaggccagcttttctggctacagggacggtcttaatctgaagaatggaagaaagaggtcctttaaaaaccagagagttggctgggcacagtggctcatgcctgtaatcccagcacttcgggaggccgaggtgggtggatcacttgaggtcaggagtttgagactagcctggccaccatagtgagaacctgcctctaataaaaatataaaaattagccaggcatagtggtgcacacctgtaacccagctatttgggaggctgaggcaggagaatcacttgaacccagctgcagagtttgcagtaagctgagattgcaccactgcactccagcctgggtgacagagcaagactctgtctcaaaacaaacaaacaaaattaaacccagagagttgtaatagtttcccagggccgccaaaacaaatcatcacaaattgggtggtttgagacaacagaaattgattctcttgcagttctggaggccagaagtcccaggtcaaggtcaggctcttggggatgatccctccttgcctcttccagcctctggtggctccaggcgtttcttggctcagggctgcaacactctaatctctgcctctgtctttacatgactttcatccccctgtgtgaactgccctgtgccttaatcgtatctgtgtcctctcctcttcacataaggataccagtcgtcagatttaggagccaccctaaatccaggatgacttcatctcaagatccttaactaattacatctgcaaagaccctatttccaaacaaggtcacattctgaggttcctgggagacatgagattcggggggacactcttcaacttactataggagtattgatgcctctgcctatagaggagaatcaatatataccatacaacccagcagtcctactcctgactattgaccctatgaaaatgaaaaccaggccaggtgcagtggctcatgcttataatcccagcactttgggagaccaaggcggggggtggatcacttaaggtcaggaattcgagaccagcctggccagcatggtgaaaccctatctctacctaaaaatacaaaaattagctgggcgtgatggtgcacacctgtaatcccagctactagggaggctgaggcacgagaatcacttgagcctgggaggcagaggttgcagtgagctgacatcgcgccactgcactccagcctgggtgagagagcgagactccgtctcaaaaaaaaaaaaaaaaaaaaaaaagatatgtataacttttattggtggttgccagtttcttccttgtatttgactgcatttttcgaattaaaaacatcttgttcctggctgggcatagtggctcacgcctgtaatcccagtactttgggaggctgaggcaggtgaatcacctgaggtcaggagttaaagaccagcctggccaacatggtgaaaccccggctctactaaaaatacaaaacttagctgggtgtgttggccagccccccataaacccagctactcaggagactgaggcaggagaatcacttgaacccaggaggtggaggttgcagtgagccaagatcatgccactacactccagcctgggtgacagaacaaaactccgtctcagaaaaaaataaaaataaaaacactggccgggcgcggtggctcatgcctgtaatcccagcactttgggaggccgagacgggcaggatcacgaggttaggagatcgagaccatcctggctaacatagtaaaaccccatctctactaaaaatacaaaaaagtagccgggcatggtggcaggtgcttgtagtcccagctactcgggaggctgaggccgaagaatggcgtgaacccgggaggcggatcttgcagtgagccgagattgcgccactgcactccagcccgggcgacagagtgagactctgtctcaaaaaaataaaaaataaaaataaaaaataaaaacatctagttcctgagaaactttttaaaaaagaaagaaaagcaaccaaccctagaggatatgctttatgccttctaacaggcatgtccatgaaggggccagattgaacagtttaggagtccaccacttatttctgtgtgctcaaactgggaatgaccatgatgctgaatttccctaaactcctatcttgccagccttcttggcaaagagttctatctggaagtttaagtagtttaatttaatagagagaaatattattcagtgactaggaaaagaatcaggcaagcctcccttcccgacaccatgaatacccacgttttttaatcggctccctcaaggtgacccaagatccaggggctcttttctacttgtgcttcttggccccccaaggacccccacaggcattctcactctactgccaatcactccaccaggggctcaacatccctctctggagccctagccaactctgtgtgtgccagcgtcctcgcttactgccggggatccaaggacaacatgcacagtgcccgcagatgatgctgagggcagccgccttactccaccccaccttcatctctgatcaaagcttttccaccatcaggtgctcctctgagagctttctcctcccctccccgctcccagctcaccccccacccccacccagtgccatctgcagtgccatctgcccccagtgccatctgcaggcttgtgggtgtgtgtcaatatttcacccagcttgtctgcagcggtgtgccactcttagcctcagaggagtcctcacatcgccagctcacacccctgagagcttgaccatgtcctcatgaactcaccgtccttcccaaaatcccataactaaaacagcctggaagtgtcaccaaggcccaaagacagccttctgaagattacttctcagtctcttagcctcccttttcctctcctctgcttcaagccctttatttatttgtttttgttgttgttttttgagacagggtctcactccgtcttccagactggagtgcagtggctctgtcacagctcactgcaatcttaacctcccagactcaaaaggtcctcctgcctcagcctcccaagtagctgggatcatagatgcttgccaccacacctgacgaatttttaaaatttttgtagagacagggtctcactatgttgccccggctggtctcgaactgctgcacgtaagcaatcctcctgcctctgcctcccaaagtcctgggattacaggcgtgagccactgcacctggccttagaaccctttaaaactcacacccagtacactggagggtaactgagctgtcactgaaaggacacaggacagtgtgaggaaaacagaagggcacagcaagccagtctcgcggagatctgcagaggtgttctctggagctccccttccaacccctcacccttctctatccctgctgtataggcttgtcgccacctcactggggacagaattttctcagacactctcaggcctgaaacctttgccttcagtttgctttacaactccctgctggctctggaaaaacaattttcccctctgcgccaaaggcctaatgatattgtccaccagaaagggttctccagagaagcactgaagtttacccagcagctaagacgatccggcctaaccctgatggatgagtttcctttactcagccttaatacccctgaaatcctgtggcaagtggagcgtttgatggggattaaataaaagcagtttacctcccactgtattaccaaatggggtttcaattccattctaagaccaaggtcagtacgggagtggatctggggtcatcactgccctagagccccggcaccagtaggcagttctctggggcccccacatggaaacctcagcagccctgagctatattcctggcctggcgtctctggaccacactgcaggcacgatgtggggttggattctttcttcacgacaccaattggccagtctcttgtatcacccctgctggccaaataatcatcttggaccccgaccattatggacctatattgagttccctccttgctgaatttggactactagagtactcttgtctgaagcacattttattttattttattttattttattttattttattttattttattttattttattttaagacaaagtttcactctgtcacccaggctggagtgcaatggcgcgatctcaggtcactgtaacctctgcctcccaggttcaagcgattctcctgcctcaacctccctagtagctggtactataggtgtgtgctgccacacctggctaatttttgtattttttgtagagacggggtttcgccatgttggccaggctggtctcaaactcctgacctcaagtgatccacgtgccttggcctcccaaagtgtttggattacaggtgtgagccactgcagctggcctgaaacatatcttttagtactttagtaatatatggattatatgttatataatatcgattaaattgtgtattaaatctagtctccacaaaatcatagcccctttgagagtggaccttctcttacacatttttccaaggcacagtgttgaacacacagtaggtgcttaaccaatatttgccaattcattgaatggtgggcattcggcctcttcatctctagagtgctgtccttaagtacagtaattctatcttaagaacaaataacagttacccaactctgtcttctgcaaaacagaaaaaagaatagagaccaaaaatggttctgaggccaggtgcagtggctcacacctgtaatcctaacaacactttgggaggccatgacaggaggatcactttagccaggagtttgagacgcacctgggcaatgtagcaagaccctgtatctatttgcaaaaactatgattacttttgcaccaacctaatatttaaaaaaagactcactcctgtaatcccagcactttgggaggccaaggcaggcggatcacgaggtcaggagatcgagaccacggtgaaaccccgtctctactaaaaatacaaaaaattagctgggcgcggtggtgggcgcctgtagtcccagctactcgggaagctgaggcaggagaatggcaggaacccgggaggcggagcttgcagtgagccgagattgcgccactgcactccagcctgggtgacagagcgagactgcatctcaaaaaaaaaaaaaaaaaagaaaagatagtggttttgaagagacccataaagagtatcttttttattcctatcttaatgaccatgtagaagacaagttgaaatactcttgggttggattgtatattcatatatatatatatattcataaatagtcatgtatatatttatgaaacagtcaccactgaattgtgtagctgggataatgttctcagtgagatgacccatagagatggttttcatcattggtagcctggacttttttttttttttttttttacagccattagtgcttttcaggctctctccaactgaatatgctgctattagataataatcaataaaccatgaactggccaggtgtggttaattccagccctttgagaggctgaggcagttggatcacttgaggtcagaagttcgagaccaggccaacatggtgaaaccccatctctactaaaaatacaaaaattagccaggtgtggtggcgcatgcctgtagtcccagctacttgggaggctcaggcaggagaatcacttgaacccaggaggcagaggttgcagtcacgccaatgcattccagcctgggtgacagagcaagactctgtctttaaaaaaaaatagcgataataataataaaccatgaaccaacactagacccatatgcttaaagtattaactagcagccagtataccctccctccaccaaaccagtagccactttgccggtgcagagcatgagcgggacaacattgttaaaacatgaattctgcttccagtgttcctgctggctgaacctgtactttgttggcgtgtcttcctcaattgcttcctccagcgagctcccaaaagccaaaaaaaaaaaaaaaaaaaaaaaagttatagtagagaggatcagtggtttggctaggcttctctgtctctttaatcgtatctgaagcataaaacaagatgactggtagacttttctcaaaatccctcctaatcagccacctctaccttgtatcctcagtagcttgtacagatggcaggaagataaaaatctacacagctactaggcttgcaccttccccaccacctgcccagcccttcaatttttagaggataatagattttcttttcttttcttttcttttttcttctgagatggagtcttgctgtgttgccctggctgtagtacaatggcgtgatcttggctcactgcaatctccacctcccgggttcaaacgattctcctgcctcactgagccttcccgagcagctgggactacaggcatacgccaccatgcccagctaatttctgtatttttgtagagacggggtttcgtcatgttgaccaggctggtctggaactcctgacctcaggtgatccacctgccttggcctcccaaagtgctgggattacaggcatgagccaccttgcccaccttagattttattttctagagcagtttaggtttacagaaaaattgtgcagaaagtacagacatttttcatctaagcctggatcttaaaccatcaaagtttctgttgtagagaaaagagctgcagaattcatgattcccaaaattgtggatttatgaagagccaccctacatcgtgatcttggtggattttatctagagaaatcaccaaatctagaaacaaatctagaaatgaagcaagagcaattgcaaaatttagaaaaacacttctgttcaaagagaaatctaggctgataagacacattccatgcttatcagtgtacctgtccctactcaattatcaccacacagcacgtaatagttcatgaaatggatttaccttaatttatttggcaattctcccatagtaggatatttaaactgttttcttcctttttcaatcttatttttcttgacattataataatgttgcaataaaaatatttgtgcgtaagtcttttcctttaagattattttctttttctttctttcttttcttttttttttttttttcctcagggtttcactctgtcacccaggctggaatgcagtggcacactcacggctcattgcagcctccactgcctaggctcaagcagtcctcccacctcagcctcctgagtagctgagaccacagatccatgccaccacacccagctcatttttaaattatttgtggagacaaggtatcactatgttgtccaggctagtctcaaactcctgggcttaagccatcctcacaaagtgctgggattacgggtgtgagccactgtgccttgccaagattcttttctttctttctgttttgtttttttgtttgttttgttttgttttgttttttatttataccgagtcttgctctgtcatgcaatcttggctcagtgcaacctctgccttctggatttaagtgattctcctgcctcagctcttgagtagctggactacaggcacccgccaatatgcccagctgatttttgtattttttagtagagactgggttttgccatgttgcctaggctggtctcaaactcctgacctcaactgatccacctgtcttggccttccaaaagtgctgggattacaggtgtgagccaccatgcctggccaccaagattcttttcttaagataaattctcaaaatgtaagcttactaggtcaaagtatatcaagatttgtaagacacttgatacttattattcttaatactttacaaaaaagagaaaattactcccttttaattttggaatctataacatggtaattattcagatttgccttccccatgtagcatttctaggttcatatttaaaggaatttttcctactgagcagttattcactctctagtgtgtgtatggcgggggtggccacgggagtcaaccagattgacaccaaaatccactgcagatgatttgtgggtagaaagtagaagggaaagaggataaacacttttccttctccctgtctctgataaatagccaaagacaggaacattattacaggtgatataggaaaagtgcctccgtgacctcccacacccaggtcccatctcaggagacaaattcagcccaaggagcaaacgagaccatgaagttcacagcactccagtgtcaggtgcccccctgtaaagctttggcttgatgcaacaacaaaaggcattcgcatcctaacgtgacctcagcagatctcttcctccacctccaagagccgggagttgtaccagagctctggcagctgcacctgccaccaccggggagcccaaatgaatcattgctgtggctgagtgttttcctttggggcccggtgaagccactgcttgtttttaatggtgttggcttaattctggctcctgccctgaactgagtgtgacgataagaacatttcaccttgtccctgctctccaattacaccacatcaggaccgctgccacttcccactgctccgtggcagcccctctatgtaccacccaagttggctgactgtgggatgataggacagagaaggaacaagccaaggagcaagacagaggagactaacaggacgcagaggccactcttaacaccacaggctttttaactgaaaggaatgttaatggtcacctgggtcacttgatctcagtctccttagggccacagatctctgatgatcagatgaaagtggtcgaactctctttccagaaaaatacgccttctcaaatttcaggatgtctcccagaatccctgaaacccattcatctagactaagttgtggtttgtttgttttttttttttttggttttggttttttttgagacaggatctcactctgttgcccaggatgaagtgtagtggcgtgatcttggctcactgcaacctctgcctctcggctcaagagattctcatgcctcagcctcctgagtagctgggacaacaggtgcacatcaccacgcccaactaatttttgtaatttttatagagacagggtcttgctatgttgcccaggctggtctcaaactcctgggcttaagccatccttgcactttgacctcccaaagtgctgggattacagggatgagccgctgttcccagttagactaagattttaatttacaaacaaggacatggaggcccaaagaacatgcaggaattagcccaaggttacacagaaaatttactgaatttacttatttatttgagacaaagtcttgccctgtcgcacaggctggagtgcagtggtgtatctcagctcactgcagcctccacctcctgggttcaagcaattctcctgcctcagcctccctagtagctgggattacaggcacatgccaccacacccagctaatttttgtatttttagtagagatggggtttcaccatgttggccaggctggtcttaaacttctgacctcaggtgatctgcccacctggcctctcaaagtactgggattacaggtgtgagccaccatgcccggccagataactgaatttaaactcagctctcctgattgccaatgtaggacccatcagcccatagtaggaggctgtcaccctgcactgagccctgtggcagcaattgtgggaaattagggtgcttacaaccaaggaaacaggatctcagactcatgaaaaaaaaaaaaaaaacctaagatcaatgagtaagcaatattcctgccatagagtcctctttggaaagtagatgctaatgccttctgttagttctccaggcacttattgagcacctatgaacatctcttaagctctaatcactgggagattcattatttattagaaattaaaactcgcctgtaatcccagcactttgggaggccaagatgggtggaccatctgagttctagaccaccctggccaatatggtggtaaaaccccatctctactaaaaatacaaaaattagccgggcgtggtgacaggcgcctgtaatcccagctactcagggggctgaggcaggagaatcgcttgaacccaggtggcagaggttgcagtgagccgagatcgtgccatcgcactccagcccgggggacaagagtgagacttcatctcaaaaagaaaagaaattaaaactcatcatctcaagcctgaagaggatgttgggttcctcaatgtgattttttgtgatttgttcagatggtgggtaccccaccctgaaatatttactacaaagttcaagtaaaggagcttcctcgtgcttgctattccatggactttggcatgagaattaggcacgctgttaatgaaggagaccagtggttggactaaaggatgccttggtggcttctactgcagccttagctattcaacagaggaacagaagactcccatgttgctgggaggttctcagtgacagtttctcaggacacacactttttaagtagcaggagactcagattctgaatttttctttctagaaagatgcaggtagcagttttgattgatgtttatcttagcggttggatgctaagaggcggttttgtttttgtttgtttgttttaatcatggaaggacctggtgaagcctacagacttgccctccagtctgagcttctctgctgactggccatgtgactttgagcaagcctctttacttctttcagccttggttttctcatctgaaaagcaggaataatattaatatgggcataatgttcttaaagcaacattaatagttcccttccctagttttacagcctattcttttctttttcttcttcttcttttttgttttttttttttttgagatggcgtctcactgtgtcgcccaggctggagtgcagtggcacaatctcggctcactgcaatctctgcctcccgagttcaagcgattctcatgcctcagtctcctgagtaccagggttcacaggcatgtgccaccacacccggctggggtttcaccatgttgaccaagctggtctcgaactcctgacctcaagccatccacccgccttggcctccctaagtgctgggattacaggtgtaagccactgcggccagctgacagcctattcttttctttcttttgcagcacatactccattctgccttgtatttttggtgatagctccccagtctgtctctcctactagatggtaacctctcaagggctatctttgtagtccctcaagcccagggcagcactttgtatgcaatgggtgtatcagtcagggcccaatcaggagatagaaaccatgcagtaatttgaataggagaaatgtaatagaaggaattattgatctctgatgggagcaactataaggatgtaaagggaactccaaaggataccctaaggctgagagagaatacccaggaaggacaaacttggcaggggcctctctgcatggctggggttcagacttcattggagaagcaggatggtggggaagttcacgaggttgacctgagccagggctggttcacagtggttgagcagcagagcgccctctggggtgcaggccagaggaggttggtggacaggggtgtgtgtggagagagagtcggggcacgctgccagtgcaaggcctgcagcacgcagtgcctgcagcaggagggccaccgtgaagtggttactgggcccaggctagggctgcaaggtcactgagcaactatgcactccaggcttgcagctggggcagagcatgaccgaaagtccccacaggcagactctgcagcccaacaacatccaaatctgaagaaatccccttcctcttgcagtggccctttagggccccctactgatgaggctcactgtaaaggagaaatgcttacagggtccagtccatgatctcagagcagaggcataagggcgactttggagctaaggcaatactatgaaaactgcaatgggtgcaatgagggatcaataaaatgtttgaattaaatcggagaaagctacataacctgtcatgcccccccttcatccgtgcttagttccctttctttgagtcctgtagattttgccaccaataaatgtcaaacctttttaactacttttgtaatttactctctggaagctcatttccctctggggtattctgtgtgtgtgtgtgtgtgtgtgtgtgtgtgtgtgtgtgtgtgtgtgtgtgtgtggtttttgttgttgttgttgtttttgagacagagtctcactctgtcgaccaggctggagtgcagtggcacgatctcggctcactgcaatgtccacctcccaggttcaagtgattctcctgcctcaggctcccaagtagctgggattacaggcacatgccaacatgcccagtagggacggggtttctccatctcatcatgttggccaggctggtcttgaactcccagcctcaagtaatccacctcccccaacccgcccgacatcggcctcccgaagtgctgggcttacaggtgtgagccactgtgcctggcctctgtgtgtcttcttaatgaggcatgtgtctctcttctcttagctcatacttaaaagagatttgcagaaagaaagaaggagcgggggggactggctctcgcaaacagtgtgagacccagtattttatttcacaacttatttctccacttgaacttgaacttgtttctccactgtctgtttcatttcgaggcagttcacttgtccctcccaaatgctttaggagtgtcctgaagcacttgacttcaagtagcagtggaaagaatcagagccaatccaagaaccaatctttctctgacttggagaagtcagtggccacctcgggtcagactagggagttaatctccttggacaaatctgaagagtccagtctccaaatatttagaaaagaataggcaagaagagaagaaccaccagccgacttggaggataattacaacacaaatattattcagaaagcatttagaaaggactaatcgtttcaagtaacttgagaatccaaccgagatgagttgagcctataaagagcccttcagatgccctcttgtgggagactgtgttaataggcaccaagtttgggttaggacagtgttcttgggtatcaaccaccctgttcttccaaaatattgcattctctcccgaagagtcagatgtaattagtgttaactgttgattccctccaggaatgagctaaacagtgggatgtggctacagttaagacttcctctaagaatgaagtggttgtccaaacttaaatctgttggccgggcatggtggctcacgcctgtaatcccagcactttgggaggccaaggcggatggatcacttgaggtcaggagttcaagaccagcctggccaccatggtgaaacccccatctctactaaaaatacaaaaattggccgggcttggtggtgggcacctgtagtcccagctactcaggaggctggggcagaagaatggcttgaacccaggaggcggagattgcagtgagctcagatcccaccacttcattccagccttgagactccgtctcaaaaaaagaaagctgtttatcatcctgcagaaggatgattatccctttagaccagaaaaatgacagtgagaagaactagaagaacttaatttttccactgaaatttagacttttttttttttttgagacagtctcactctgtcactcaggctggagtgcagtggcgcaatctcggctcactgcaacctctgcctcctgggttcaagtgattcttctgcctcagcctcccaagtagctgggattacaggtgtgcagcatcacgcccggctaatttttgtatttttggtagagacagggtttcaccatattggccaagctggtctcaaactcctgacctcaagtgatctgcccacctcggcctcccaaagcgctgcgattacaggcatgaaccactgagcccaggccgacatttatatctatatattgcggctgtgttgttgttgttgttattattattattattattattattattattattattattattttgcaagtgatgtgcattctgggccagtgaaacctagagcagattggcaggaaaccatctcagtgtcttaccaagctttaccttgttacctttatgtgtacaaaggaaattgtgcccttaaatgatcaagaaaaacaggtgtgtttcccctggataatgagattgtggtttattttcttatttttgcttatctatattttctgcaatgagcatgttttatttgtgaaactaaatatatataaaaatatatggccgggcgcggtggctcacgcctgtaatcccagcactttgggaggctgaggcgggcggatcacgaggtcaggagatcgagaccatcctggctaacacggtgaaaccccgtctctactaaaaatacaaaaaattagccgggcgtggtggtgggcgcctgtaatcccagctactcgggaggctgaggcaggagaatggcatgaacccaagaggcggagcttgcagtgagccgggatagcgccactgcagtccagcttgggcgaaagagtgagactccgtctcaaaaaccaaaaaaaaaaaaaaaaaaaaaaatatatatatatataaaatatatatttttaacatatatataattttaattttaaaaaacacacacttttctaactcttggcctatatccctgctttttgactcaaatttagccagaccctttccaacctctttactcctcctgttcaggtgaactgccaaaaatcagcagacttcagtttgggaagagattttttttttttggaagagattaatttcctcactcttgaactcctaaaaacagcccagtttttcttctacctctcaccaagcagtgattgatgctacacctgcctctgatgtgacaaaaccaaagccatgaatcaaagccttctatgattcttgcgcattctgaggctggtgaaagcactagccgggggccctgagacgtgtgaagatgctctgtgtgggggttattctgcctcgggcactttggagggtaacacctgctatcactaacctttgatatgttgctctgctttttcagattttcgacaatgaagccaaagacgtggagagagaagtttgctttattgatattgcctgcgatgaaattccagagcgctactacaaagaatctgaggtaagcaacagttgggatgagatgtggaagattcattcattcattcattccacaactatttcttaagtgcctcctaacttgggaggatgccatctctcgtcgtgtggattcaatttgctttcgtatcttgctggttctttttgcaagtctcaaaattaagtctctaactcttcagggaccatcattggccctggctgttactcaatctccacttagttttcctgtctcccaactctgccatcatttttggcaacgtcagtatccatagggctggaccatccaacacactggccttgctgaaaaacaacagtctccccaattacatgcgctcttttttttttttttttcttttttttttttgagatggagtctcgcccaggctggagtgtggtggtgtgatctcactgtggcatctgcctcccaggttcaagccattctcctgcctcagcctcctgagtatgtgggattacaggcgcccaccaccatacctggctaatttttgtatttttagtagagatggggtttcaccctgttggccaggctggtctccaacttctgatctcaaatgatcagcccaccttggcctcccaaagcactgggattacaggcatgagccacctgtgttttatttgtatctgaatcaatccttgaaaactttgatagctcattccagcacagctcctttctctcaaaacagcaagcaccttaatgaggacatctcctttgttcttggctgagaataaatttcagagaacttctttctgtctggttttcaacctaccaggatccatcctttgccttagttctaccttcttgttatacggtttgtgcaagtcaccatttatatcccattagtattttattaatggctgctgacggaacttgggtgacccacttgtaaataacatcccagccctgcaatgacagcagatgcagggctatttttgttggttagcgacatgccaccaatcccaatatgtttggaatcagggccccagactcgtccttgagccgtaacacgtggaccttgaaactcttctcccagagtcatcaaggctgatgggagacacaataaataaacttattcaaaatgaattctgtcgttacgcaaataaaccaggctcccgacgtggttcagatttcttttgcctccacattttggggttcatttcggtataaaagtcttacctgatcttagcaaatgctcggctgcttaattgcaggcgcttatgttcagctgctgtccctgaaagggctggggagaggctgatgtggatcactctgtgttgctcatctccacccaaagggtgagcgttttaacatcatcagctttcattatgctctgtggccaaccacacctatgcattttaagataaagaaagttaaacgctccctacgtaactgtggacccgccgaagagggaaataaacagggccactgaccttccccttgtctcactccacagaaatcctatagtttcatgtcaagtccgccagtgcttaatggggctctgatgatgcgcagagcattgtgcaaagcactcctgtgacgcctcgggcccccccgggctgctgtcctacctggacctcccggcctctttgggagctctgggccttccaggaaagcagggttgccagaaaactctgaactaatttcagcttttcctcccagtgtgctttggcgtggctctgcctggacttcagggagttccctcctgattcagtaggaagtcttgatacaaatatagaatattaatgaagaaatcaagtctcatttctagtcaacgtgcctgactcatttccctgtgctctgtgcccccaaagaacctccactagaaagcttcctttcattcacacagacattcgaggagcttttccttcatgcttcacagggtcactcatgggcacgtccgtacctccttccctgggtcctagagtattcttccctggatgcagcttggccaaggagatgagtggtaaagagtccagtaattattcatccaataaatatttatggagtcctcactgagtgtcacatacaatgttaagatggggatgtctgggcatggtgcctcacgcctgtaatcccagcactttgggaggccaaggcaggcggctcacttgagttcaggagttcgagaccagcctgatcaacatggcaaaaactctactaaaaatacaaaaattagccggcagggtggtcagctactcgggaggctgacgcatgagaatcgcttgaacctgggaagtggaggctgcaatgagctgagatcacaacagagtgagaaactgtctcaaaaaaaaacagcaatgagccaaagagatgcttagggtccctcccttcaggacacttccaatctaacaaataccacgcagagagtatttggcgaacagtagagaaatagtcacacagatacatatggagttcagagtcacacgtgcaggaaggcaggtacggggagagactgtgataaggaaactgaatttaagaggataggatcaggagacatgctatggaaaaaatgacatttcaggccgggcgcagtgcctcacgcctgtaatcccagcactttgggaggccgaggcaggcagatcacctgaggtcaggagtttgagaccagcctggccaacagaatgaaaccccaactctactaaaaatataaaaattgcccgggcatggtggcatgcgcctttagtcccggctactcagaagactgaggcaggagaatcacttgaagtcccagcgactcaggaggctgaggttgaacccaggaggcggtggttacagtgagccgagatggcaccactgcaatccagcctgggcaacagagactcggtctcaaaaaaaataataataaataataaatgaagctgaggtgtcataggatctaaattatgcttttaaaatattgttctggatggagaatggactggagaagaacagagtcaggagaccaccaaggtcactattgtgatttatattgtcggttacttaggttctgtcgtggcttgcgctagagggctggtggcagagatggacaggagcagatggtttggaggtatattttgaagatgagttgacagggattgctcatggattggatgtggggatgaggttgaaggaggaattgggatggccttaaggattctggcttgggcaactgatagatgggggtgctgcttactgaaatgggaaggtgagaagagaggtatacgttggagaaagatgagtggattttgtgatgtcagtgaggcatctaacacagacagaaatgagtctggagcttaggtgagagatctgggagaccaatttgagcgtatttggcgaataggagatttaaaaatcctggggatggatgagaggaagaaagcatgaaatataaatgggaaaggggttcaagtctgagccttcaaggatggcagcatatggagatcaggttgaatctaaaagaatcaggagtctaaaagaattggccagaaagttaggaggaaaacacagaaatgcaccaaggaatgcaagtttcaagaggaggagagtgaccagaggtgctgaatgctgccaagagatcgagtaggaagagaatggaaaactgtccgctggagcagttctcaactgggggtgattattgcctcacgaggatgcttggcaatgcctatagacattcttggttgtcaaaacataggaggtgctactggtatctagagtgtagaggccagggatactgctaaaatcctctacagcacagacagcccctcacaacaaagaattatctggctccagctgggcgcggtggctcacgcctataatcccagcactttgggaggccgaggcaggtgaatcacaaggtcaggagttcaagaccagcctggccaacatggtgaaacctcgtttcttctaaaaattcaaaaaattagccgggcatggtggtaggtgcctgtaattccatctactcgtgaggctgaggcaggagaatcacttgaacccaggaggccgagattgcgctactgcactccagcccaggcgacagtgcgagactccgtttcaaaaaaaaaaaaaaaaaaaaaagcattatctggctccaaatgtccatagtgccaaggctgggaagccttgttctacaggaagaggtgattgaagatggatggaactctggattcagctttgacgctcagggccacccctggcccgccctggagtcttacggttactaaatggatgcgggagaaggggccccatagggctgagccctgcacattcatcatccattgtgtgacctcccaggggatctgctggcatctgtaacaggtggaattcctcctccgtggacctggcagccggaccacaaagggctataggtaccactgggagcctgcaataaaatcttagaaaaagcattcccccaggggcgactccctcgtaaccccagccccatcaccttcaacaggccagaatacagactgcagtctgaacccacccaaaggaagaggggtgagtttcctgggctgttttggtggttgtgtctactgtaaacacaccagggactgggaataagaggaacaaccgattcagaaggcaaaccatttccaaacaaatgtctaactggcacactgtagataattaacaccctccaccccaccacaggagtttccttctaaaatgaaatctgaccttgttctttgcttgaaacccctcactggccctcctttagagttcagctcacacaggactccccctttctgagttttcctgggcatgcccccaccactgctggtctggaggcagcaaagttctggtccgtggcttctagatcatgctaggttatgctagctcatcactatggcatgagctctgcgaagacaagagctggctctttcccagccgctgccacagcaccagtgcttagcaggcgctcactcaatggttgctgaatgaatgagtgaaggcaagggactttgctttttttcttccagcagtgacaatttcagagcaaccgctatcaaagaaaatgaattcgttgccattaagcaagcagttgtgaatcagagttcctttttttttttaatcggaggcatccagctccatgggccttttcttcccatccatctttgtaagttgacgatgtcagcgtcctaaatagaaacgctctttatgtgaggaagccggatgctgatgggctgaatctgttcctggatttttttgatgctgatgaacccagaccagggttatctgggttgctcctctccactcagctactgttgcacacacacacggccatccaggccaaaggaggggatgaaagcactttcctttctttttccatttctccctggaaacctttgagccacacaatcaagactgcctctctcatgaaggtgaccagagcttggagttttccactgggtgccctctgcccgatggccctcgtgccatcgccactaaccggggactcagaagcatgctttggggattcaggaccagctgatagcccagctctgtgctttccttattctcatttttgctgtgttgctgtttcctgttagggcctgaacttcagctctcaaaaacctcttagcttcaagtttgttctcatagtcattaatggactctgcagggcagtgccgtattgtggggtgggggtggggggggaattagtgtgatttttttcaggcagagagagcccctccattagtcacacagaccactgagaccctgcccgcccataagagtcataaagctgtttgcaccatgtcacatgtaaaatgaccatcatcaacaccaaagcaggaaaaggggtgaagccaaaagctgagcaggttggactggttatgtggctgatacatagtgtcttgccgctgccaagattttcatcccagctccttgatgctctgccaagatttcaaggtgaagatcccagcggaggaatgaggaactctgcacgataagtcggagcatgcctgcagaggccacaggcagtgcggccatacccgcaaggctgagttggcagttttggggtgcaagaacaaacctcaacttctagcctgcaggactagcccaggctggagaatctgaaagccatgctgggagagatctaacccagaggcctttgatattggcttctagtcaagttcaagtccagtactttctcctccattcactgcagtagttcctgaggtctggcttccatcatgagatggggagtgaccaaagaaaatggcatctatactggcctcctgggggctgccacctgcagcaatctcccctagacacaaatgtgtagggcgcgtgcagcttctcaatcttcagacatacctccagggcaaaggaagggaaagaaaaaggaatgtctttcctagtcaaggaagtagaagtagagggttttgtgtgtgtgtgcttccttttttaaatcttcattgattcatgtaatgaaaagcaaaggagtctctagcccagaggttctcaactacaggcaaatttgtccctcagggccatctggcaatatctggagacatttttgattgatgaaagtggatacggcatgttatgaatccagtcggtagaggtcagggaggctactgaacatccaaaatgggccaggtgcagtggctcacacctgtaatcccagcactttgggggaggctgaggcgggaggatcacttgaggccaggatttcaagaacagccggagccacacagcaagaccctatttctacaaaaaaaaaataaaaataaaaataaattctctgggcatagtagcatgtgcctatagtcctagctactcaggaagctgagatgagaggatcacttgagcccagacgtttgaggctgcagtgagccatgatcatgccactgcactccagcctgggaaacagagcgagaccctgtctctaaaaaagaaaagaaaagaatccaaactgcaccacaacagagaattatccagctccaaaatgtcaagtatgccaagatcaataaaccctgacatggaccaatccaaggaaagaaaacttagtaaaacctactggtatcaagactcattaatgaattcctttagttagcatttactaagcacctactgagtgccagctccacactaagcattgagggtacaaaaacaagattatgtcagccctcaaaggtcctgtcttctactgccttttgaattgatcatcttgttacagatgaagcaatttctcatcccctttattttggaggatataaaggccatcttactagtgataaatacagcatagtaagttgaataggggaaatttgcaattgtttgtactcagatagcaacaaaggagaaagaataacatgaggctgtcctagaagcatgggcccctgacgtggcataattaaatgtttttcagacagaatttgattttgaactttccccttaagttgggtgactaagtctccaggtccctgggtcatagccttcctggaccaagaactccttggcagccagttcattggtccccacagatctaaatatctgttgaattctctgttaagggagagagaacagaacaaaaggagatacatctagcttttccaataactgtcaagggtgagagattaaatgttgtttgctaaggaccggccctcagaaagggaacagagagatcaactaagtaaatattgtcatatttagctgtacccttcggtacaaagagcttcatccaaatcactcggctccctcaaatgaaaaatattttcattctggtctacatcttggcctttgagggtggtaaagattttccgttacctctaatggccagatttaacacagctgcctcatgccggggtacatcgttaagttcacttggttgtgctgttattatctttttttttttcccgtttccctcaagtccatctgtttctttctgagagtaacgcagctgttttgcagtgggttccaacttactggggcctgcatgcttcttggaaaataagaggacttgatgacatcactgggatggggagaagtccctgctgccaaaggggtccctggtgggagcctctaaaactggagggagagggaggaagcctgcaaaggagacacaagagaagggtcctcagcagctgccgcatcgcgggccctgagccctctccccttccagggtctggatgatgccagtgctgttagaaattgagagagaaggccaggcacagtggtccacacctgtaatcccagcactttgggaggccgaggcaggcggatcacttgaggtcaggagttcgagaccagcctggccaacatggtgaaactccatctctactaaaaatacaaaaattagccacgtatggtggcgggcacctgtaatcccagctactcaggaggctgaggcaggagaatcacttgaacccaggaggcgaagcttgcagtgagccaaagatggtgccactgtactccagcctgggtgacagagcgagactctgttgaaaaagaaaaaaaaaaaaaaaaaaaagaggccgggcacagtggctcacacctgtaatcctagcactttgggaggccgaggcaggcagattgcctgagctcaggagttcgagaccagccaggacaacatggtgaaaacccatctctactaaaatacaaaaaattagccgggtgtggtggcacatgcctgtaaccccagctactccggaggctgaggcaggagaatcgtttgaacccggaaggcaaaggttgcagtgagctgagatcacaccattgcagtccaggctgggtgacagggccagaccctgtctcaaaaaaaaaagaaacccatgatctggttgggaggatatggtataatgacacaaatgctaagtgacagtacggagcaaggcagcaagagaaatacattcacacagtcatgtgtgatctactttcctcaaacttgtacacatagtcatcctcagaggattcccaggactagtcagggaagactttacagcagagatggaatctgagctgggccttaaaaacataataggtttatgtttattttttgctcataaattaatacatgatccttgtaaaaaaaattccgacatgatacaaacacaaaacagagcaaatctcctatgatccctcatcacagacatcgctgttaaagttggtgtttatacttaaacataatgcataaatagtattattttataaaactaaactcacactatgcacaccatctcgcaacatgcattatttcactaaccacataagcttgccatttttctgtgcagcacacgcctgtctagtgagttttaggtggccggataatatgccagtgaaggccaggttcagtggctcacgcctgtaatcccagcactttgggaggccaaggcaggcagatcgcttaaggtcagaagttccagacccacctaggcaacatggcaaaaccccatctctataaaaaatacaaaaattagccgggtgtgatggcacatgcctggagtaccagctactctggagactgagggaagaggatcacttgagcccaggagtcggaggctgctgcagtgagctgagatcccgggcagcagagcaagaccctacctcaaaataataataataataataataataataataataataataataagcgagtgtacggtggtgccatgtgtacatcattctccatttgatggacatttagggtgtttccattcttattatggtactgcaagaaacagccatagatatattttgagagttgttctaacgtctctgtagaataaatctaaaagtgaaagtgttgagtcaatggacatatgggttgagattttcctagatataacaaaattgcccacaccctgcggctacattaaattgcccctgactcacacttggatgggagcaaactcaggtctgaagatgtgtgagatggaatggacagtgtagtgaatggctgaaaatgaggagtctcagtgcatggtcaagggtcagtgaggcacaagggaaaaacattgagtaccaagtcaatgaatttggactttattctgcaggtcgcagagagtcttcaaagcaggggtcaccaaaaataaaaaattccgttggccaagaaaaaagaaaaagcaggggttatcagcaaccgtgcaaggggactctacctgtgacctcaccagaggggctgactgtcttgtggggatggtgagggcaagctcctgggtgcccagaggtttaggacccttcaaatccatcaacctacatccttccctcttctgctaccccctttcatgaacaaattgccctcagccatcttgacaacaataagattttattaatgaataggaacatttggaaataaaaaggtgttaaacagtagtccagttctcaacaaccctggctgcaccattttcagaccaataattggcatggcaactcacttcccaaggaacaatgaggtgttctttttcagacctcattccttccaaacccgggaaagataagacgccaagtctcgctgaagcaccgtgcctagtgctgattttaaaagccactgctgttctcttggcctaataatgcgaagctacctcagcatttggatcaaaccccatttttactgggattactacaaaaaatgatagtgcccaacttcatcctagagaaagagttttcatttttttttttaatttttcaaggggaaaaaaaccatttaaactgctgcagtaattggcatgaatgatgttccccagaactcagtgttcagagcagcagttgcaaatcctaccaattgaatttggtagtgaaatgccagaccaagtaggtcaaacaaaatcaaggcatatgaattcctaaatgccagatcaaaagcagagaatctaagtctctgccaggagtgcagttgctgattgtggcattgtgggtcattgaatcaatagaaagagcccttgggggccaggtgcagtggctcacgcctgtaatcccagcactttgggacgccaaggcaggcagatcacttgaggtcaggagttcgagaccatggcaaaaccctgtctactaaaaatacgaaaattagctgggcatggcggcacgcacctgtagtcctaggtactagggaggctgaggcacgagaattgcttgaatccgggaggcggaggtggcagtgagctgagatcgcgccactgcactccagcctggacaacagagtgagactttgtctcaaaaaagaaagaaagaaagaacccttggggaaatcaccctatcaccctatatcccaaaaggaacagaccagggagggaagaattcatccaagcaaaacattcatggaagggagaaacagttgggcttttcatagagggatctgtgcaaaagataacccctagaacctatgaattgggattcccaacttgtgtgctctgtgtctagatgattcagccctaatgtggtgagggccctggctctgggagcctcccaggcggtcacagccactgcatttgatcatcatcaattctgtgtctgagtccctccctcccttccaaagaatggacagatggacagatgggatggagaagtgagatgacgtcaaaggcaaggcatggaaagtgaccagcacagtccctggcacacagtaagcatttcataagtgttcccttctctctgctttgaccctggcttcgagctctgcagatgggttgcaggaatggtggctccgtggaaaccatgtgtctttggaaagtggccaccgtgagtggcgtcacaggagtttgtttgcgtgtcgcttttcccttgtcggtgtgagtggagaacaggagcagaggtgtgataccaatagctccagctctcaggatcatgggatcctccgccggctcagcaagatcctgcagaagttacagccatttgtgctgctgagacttttcaaaaaaaatgtgttattgcctctgttatggtttaacctgaattccggatggcacgtgtctctgctacttcacctcgaagaaaccttagaagttacatttgctgtttgttttgtgccaagtctgggccatctgtggcactgcagtgccgggatggtacccaaggcagtattgccatgctatctctgtctgccacgagccttcttacagctgtactatagaaaactaacatttaagactttcaaagaaggaagcaagagctgaagggcccaaggctctcagccaggagtgaacagatacaacaagctcttcttcagttccatctcatggagaacttccctctgtaatttttttttttttttttttttttttttgagacagagtctcactctgtcacccaggctggagggcagtgtcacaatttcagctcactgcaacctctgcctcctgggttcaagcgattctcctgcctcagcctcctgagtagctgggactacaggtgcacgccaccacgcccagctaatttttgtatttttagtagagacagggtttcaccacgttggtcaggctgctctcgaactcctgacttcaggtgatccactcgccaaagtgctgggattacaggcgtgagccaatgcacctggccctgctctgttctttcaagaaaacaggcaatgagtccacacaagttgctcataactggggccagccacatcagcccctgctgtttttagtcttattaaagtaaaacaccagaacttcttggcccttagaacagagttcccaaatcaggtcagcatcacccagggaggttttgaaaactggagatatccgggtcccaccttagaccaacccaaccagactcaactggtctgggacccaagaatcagtgtgtaaatgcaccaggtttgggaaaatggcctcagagcagagcttcccatcttttttcatgccttgacaggtaggaagtgtttcgttttggccaggcgcggtggctcatgcctgtaatcccagcactttgggaggccgaggcaggcggatcacctgaggtcgggagtttgagaccagcctgaccaacacggagaaaccgcatctctactaaaaatacaaaaatcagccaggcatggtggcgggcacctataatcccagctactcgggagcctgaggcaggagaatcacttgaaccctgaaggcggaggttgcggtgagccaagatcgcgccattgcattccagcctgggcaacaagagcgaaactccatctcagaaaaaaaaaaaaaaaaaaagagaaagtgatttgttttgattgacacattgaggaggagctcctggttaagatgaccaacccctgagctcagaaggcccagtctgttactcaagggctgcgggagcaatatgccttatcacatctactatccattcaccatagggaagctttgcctaagagagctcaacttactgaggtcaaggttttaaaccactttattgttacttaatttgggggaggagggatgcaggggggttagcaatgtaagcctgtaagcctgcccattccccgattgtgagagaggtcagtgcctttgaattttgttctgtctgttgggaatctgacgccatctgtagaatcagatccaaagtcttccttgacagctactagcgttaattataacataagtttgtgcagtttttttcctaagttgcttctgatttgggggtggcttcagattgacattattgaagtttatttcctccacccaaagactctaggccggctgtgattgttcacgcctgtaatcccagcactttgggaggccaaggcgggtggatcacttgaggccaagagttcgagaccagcctggccaacctggcaaaagcctgtctctactaaaaatacaaaaattagacaggcgtggtggcgggtgcctgtagtcccagctactctggaagctgaggcaggagaatcacttgaacctgggaggtggatgttgcagtgagccgagatcgtaccatttgtactccagcctgggcaacaagtgagactctgtctgaaaacaaagacaaaacaaaaaaaagactctggtagctgtccaccaggtcctctggctaaatcttctccaagccctttctttgtttagcactctaagaatctgcaacaatgactatgatgtttgaggtggcatttttctccttgagaaataagacctgacagagcgattgtctgctccacatctagttattcagactccaaatacaactgttcagcttctgttccaaaaatacccaagaaagaataagtgttattaaggtgcttgtcttcatcttttattattaagaggcccagagaaagacttataattactagctcattagcttgggccttagaattttcaacgaaaatttctcacaaaattgctaaacctggttttagaaggtatggaactaacttttgagaaaaataaattccaccatttagagtctcactgtcgcccaagctggagtgcagtgatgcaaccacggctcaccgcaacctccacccctccaggctcaagcgatcctcctaccacagcctcctgactaccagcacatgccaccacaccagctatttgtgtgtgtgggtgtgtgtgtgtgggtgtgtcgtgatggggatcttgcagtgttgcctaggctggtctcaaactcatgggctcaagtggtccacctgcctcagcctcccaaagtgctgggattacaagtacgagccaccactgcacccagccaacattgtctccattttatagataaggaaactgaggcttagagagtctaagtaactggctggaagtttcaggaagcctggattcaaaccccaaagtgtcctaccccaaagattatgcttcccctacaccaagtaagactccttcaggtaaagctagacgtacaaacaactgttgtctttggaaatcactctaagaaatagttcccttcttaaatatatcttcccaaccccgagtctcagtgactaaatgatcttagggaaagactggtatgtagaaaaagaagggcctttgagacggttggttacctgatgtgatagaattccactcctcatctttggggagaagtttcctctttacaaacattccagaacatagtggattggccaaaagcagcttgggtctgtaaaaaaaaccaaaaactaaaaactagccatcctccattagagaatagaaaccttttattattttttttcttttacacaaggtctcactttgttgcccaggctggagtgcagtggcaccatcacgacccactgctgtcttgacctcctgggtttaagccattctcctgccttggccccctaagtagctgggactacaggtgcacaccatcacacccagctaattttgggtttttttttttttttttttttttttttttgtagagacggggtttcaccatgttaggtttcccaggctggtctcgagctcctcagctctaaccatctgcccgcctcagcctcccaaagatgacaggtgtgagccaccacacccagcccaggaagctatttttaaaaagaaaaaaaaaagccattagtcaccaaagaacccatctacagaccctaattcagaaatattccttttctcactttagcatccacacgatagtcttagagttaaataacttgcccaggttcacacagtagttactggagctgaaattcaaacctgggggcagggcatgtgttctctcacttcaaagcctcctcagttcatctctcagttctgctccacagatctgaggaccccacaaggtgctcccgggcatggtaaacagtgaaatacattgtatcaaacagtgaagggagaaacagcctgaagaatccactcatcacttttacctgctttatatactgggattccaaaagtgcatttggagaaacaaaatgagttctgaagctcaaataagtttgaaatctaaaagtggaaatattttattgtcttcaaattacagactgattggcttattgaacatctctaccctggtttctgttcgacaagttggaggcctaaatttcccaaaataatacagtacacaaggagcaagctagacttagggacagttaatctggtgctgatcactgttggcatgctgcaactcatcgagatatttgtcagcctattatcagcttttgatttaataaacttaagctatctctaggccaaattgtagatcctcggtaggaatgcaggctgttaatgcctccccatagccttcgtctaaagagcactgctaaaatcagagtggagaacagcctcaagttcaaaggctgcaaaccgagccaggttctaataagctccctttatgggaggagctgggttcttggcctctcactgtctcatgtattaaggtggggtcctctccagtgtgcccttgaatgaccttattgcttttgattagaggttaccttgaactatactcatattgccaaacggaacaggttagtgttctgcaacaggatgttagggagacagctcttgttgctctggaactgggaaccaggcccaaagctggggacaaagaggaattgggactccacattcaccaggcagctgctaatcaccagtggcccagatgaccctcttcccacagctctggttgcccctatcttccccttccctaggccctatgtggagatgaaggaggggagtttgtagtcattgggagtatacttcttgcctcaccccaatcccatgtgacaggagtagtattctgagagaatcaactacagtagctggggcatctgcaaaaaaaagctggctataggcccagtgcagtggctctaatcccagcactttgggaggccaaggcgggaggatcacttgaggccaggagtttgagaccagcccagacaatatagcaacagcccatctacaaaatatttttaaaaattagctgggcccagtggcacatgcctgtggtcttagctactcaggaagctgaggtgggaggattgcttgagcctaagagttcaaggctgcagtgagccatgattgcaccactgcactccagcctgggtgacagagtgagaccctgacacacacacaaaaaatagttgactgtttgctgagccgggaacttgcaggcccaccctcaatgctgccatcctgcaagacttgggtgatactaataagtgtccccaaaagcttgcagaggaacgtagagattgcacctgctgcccatctggaaatttctaaaggagtttttgaaggagcccatggctagggctgagatggaaccatgggagtgtgagcttgggaatagcacgggggcatccccttgggcattattgaaaatgcaggtaatagtgggctacttttagtagcttgcttatgagaattctggggtgttttctgtgtctccaaccagttcaattctccagcaccagctatgtgtccaacaattcaattcaattagacactgtctatctggagttagcatcagatcccagtcccacaaagctgccccacttctcactgacaggctataggccgggcacagtggctcattcctacaatcccagcactttgggaggccaaggcaggtggatcacttgaggccaggagttcgagactagcctggccaacagagtgagactccatctctattttttttactaaaaaaaattttttttttaatctggggtctccacgactccttcctcaggctcaataatttgctagaaaggctcacagaactcaggaaaacatttacttagatttaccagtttattatcaaggatatgactcagcagcaggtaaatgggagagaggcatcaggtgaggtattggggggtggggacttggggcttccgtgccccctctgggtgtgccatcctcccagcaggtcagtgtgtttaagcgtttatggagctcaatcccagcaccccctccctccctagaggtcagtggatggggctgaaagttctaaccccctaatcacctggtgtttctggtgaccagagccatcttgaggccatctagggcccctcacctgtgtatgtgatctgaaggagcttgttatgcatcccaaaagtcacccccatcactcaggaaattccaggagtttttggagcattgtcttaggaagcagtgacaaaaaccaaatctattttgtattacatcacaaggatgaaatgagaaagcgaatctgaagtgcctgacacagactctggtacggagcaagcacttgaaaacgttagctcctagggtgatttttcccagcttccttccttgactttcctctggccacctctcttgcaagttctcatttgctttcatcttctccccagttcctaaaaggcatcctgggggctagaaaccataggctttttttttttttttttttttttttgagatggaaccttgctctgtctcccaggctggagtgcagtggtgcgatctcagctcactgcaacctctgcctctcgggtttaagcgattctcctgcctcagcctcctgagtagctgggactacaggcatgcgccaccatgcctggctaaattttttggatttttagtagagacggggtttcaccatgttggtcaggctgatctccaactcctgacctcaaaagatccgccctccttggcctcccaaagtgttgggattacaggtgtgagccacggcgcctggccaaaaccatggactattacattgttttgtgtgatgtgctcaaatttctcatttgcctcgtccctcttcttaaagcaatgagtttcaagtgtttgtggcactgaactataactgagaagggtacaaaacagaaacattccccttgccacagctgcctttcagtgcctttctacacatcagatgcaccttatgagtcaaactcctttaagagagtcattttgcagagaaaaaacacaaaccgctcagggtttgcggtgcattctagtgccaagagcaaatgctttaaaaatagcactttaggtattaactgctaacaaagcaagaattgactgcttctggcatgatttgcatttagggttttggtttgtttttttttaagttgatgcatagcagttgaccttttaagtcaagttttaggtcagttctccagcacattctgaaagctccttagttttgtctcttttttaaaaaacagctttattggctgggcacaatagctcaccactgtaatcccagcacttttggaggccaaggcgggtggatcacctgaggtcaggagcttgagaccagcctggccaacatggcgaaaccccatctctactaaaaatacaaaaatcagccgggtgtgctggcacgtgcttgtaatcccagctacttgggaggctgagacaggagaattgctggaacttgggacgtggtggttgcagtgagccgagattgcaccattgctctctagcccaggtgacagaatgagactccgtctaaaaaaaaaacccaaaaaaacagctttattgagatatagatcacataccatacaattcagccattttgaatgtatagttcagtggattttactataatcacatgtttacctcaccacaatcaaatgtaaaacattttcatcaccccacaaagaaacctcatatgttttagctatcatctccctaccctctcccctcacccatctcccaagcctcagcaaccacactgatctactttctgtctccatagatttcccttttctgggcatttcatatgaatagggtcacttaataagtggtctttggggactagctgctttgaaagctccttggttttatgtgtatccctcttaagattcaagttcaaggaatcctacattaattcagggctaaactttactttcattggaggggaatgagaatgagatctgcaacaccttggagtcttcaggagaagttccaggatggagagaaaaaaatctgacatgtgatatgtgttgttcatccatccctattttagggctgagggttatagttacataatgtagcaattcctggctggagttcctgcttagccttttttcatttagcatttatcaaaaacttctcatttcaattaacagggcaagcccctgttggctattgccctttgtggttcaaattgagagtgtaattaatcatggagacttcatatctcagtgaacgtcagctaataagattgcctccaagatgcaagctcagccccagctggaccaagctctcctgtgggcttctccttgcaccttccaggtgggagactgattctatccaaaacgaggacgcagttttacacgggctgctcaaacaagccctttgctctgccttgtcccagtgcgagatggatgaggcctgcaggtgtggctgatcctatagagtggacgccttctaaagatgtgccgaagtccatctggccccagggaaacagccctggcaccagctcaaccccctcgatacagatgggctttaactacaagggtccaatttgccatctgccaagcctggagagaatcggtagcatccggagccagagatctcattgtggatgaatttataaaaccctggctagaagaacttgcagccccacgcgttccccaccagccagctgccgggccgagaggagctgggcagggcccttgaggcaagagcatcgcttgcagagaagttccacatcccccagcggagccagatgccactactggggttcggtgctccgtgaccacatgagtgagctggaagagtgaccgcggaacctagaagacttgccttgtaaaaacctctctgactcatgttatgggtttgtgtccccccagaaagctaggttgacgtcctaacccccagaatgtgaacttacttgggatagggtctttacaaaggtaatcaagttgaagtgagatcattagggggaccctaatccagtatgatgggtgtccttataaaaaggagaaatttggagctgagtgcagtggctcacgcctatggtcccagcactttgggaggtcaacgcaggcggatctcttgaggtcaggagttcaagaccagccaggccaacatggtgaaaccccatctctactaaaaatacaaaaattagccaggagtggtggtgggcgcctgtagtcccagctactcgggaggctgaggcaggagcattgcttgaacccaggaggtggaggttggatggcaccactgcactccagcctgggtgacacagcaagactctgtctaaaagaaaaaaaaggttggggggaatttggacacacagacagacaagcacagagggaagacgatatgaagatgcagtgagaatgtgatgacttcactccagtgatgcttctacatgccaaggaacgcccaggggaaaggcatgaaacagattcctcctcacagcccttggaaggaccagtcctgatgacacctcgatttggggcttctagcctccagtactgtgaaacaataaatttctgatgtttaagccaccagtgtgtgattatctttttgttgttgttgttgttgtctgtgatacttgatacagcaggaaacgaatagactagtggaaccaaccctccaccctaaataggtacgaatgaaaaacacatatcacatgttagatttctttctctgcattacggaacttttcctgaagcctccaaggtgttgcagatctcattttcattcctctccaatgaatgaccatttcaaccaggtaaaatttagccctgagttaatgtaggatttcttgaacttgaaccagggaggaagagagccctgccctggcttggaagattactggaaggaaaggacagcgtatgcctctgtatgcctttcagcccttcacaaggagagcttgtaagtcacctttaagatgcgtgaaggctgccggactttgaggctcacccatcctgccattgggaggtggctgcccagtacatgcaccgttcaaggagggccccctgcttggctgggaccacgaggttccagaggcccccaggtgaaatcgcctaagggagcggcccatgacagggacaatctgctctgctctctgctttcgtccacttggaacagagtgttcctgcctctgaaacataagagaaagggggaaagacattggtactgagcactgaagactgtcggttcacctggacccagaacccagtcataacatcccacagaacaagaacccttctctcgcaattcctccaaccaccatacttacggacactggcatgtgacagcttccagaaaatggaaatgcccacccaggctttcactcacacaaggaaacctgcatgctgttgggcagtcatattttttatttgagatgatcagcatttttctgtacatttgactacaggataacaataaactcatagtaatcctacagcccctgggacattcccactgcctttctttggaggagcttaataagatttgaacaaagtgcactacagcatctctcagggcatccttgtatcatgtgcttatcactttgggatgtctcctgtgcatcacgcaccttctatgtgccaggctgggctggggactttgcctaccttatccaatttaagtcttgcaacaacccgcaaggaagttttttgattttttttgagatggaatctccctctattgcccaggctggagtgcagtggtgcaatcttggctcactgcaacctccacctcctgggttcaagtgattctcctgcctcggtctcccgagtagctgggacaacaggagcgcgccaccacgcccaactagtttttttgtatttttagtagagacggggtttcaccatattggccaggctggtctcaaactcctgacctcgtgatctgcccgcctcatcctcccaaagtgctgggattacaggcatgagccaccacgcctggccaggagttcttaacaccattctacagatggggagatggaagctctcctctgatcaattgtgccagaatttcagacagaatgtcctgtccacatggtgtaggggtgacgtgttaaaccatttgggctgcaataacagaataccatagactgggtagcttataaacaataaacattgattttttacaattccagaggctggcaaatccaagatcaaagcattgacagattcagtgcctggagatggctcgtttcttggttcatagatggcgcccctctcactgtgtcctcacatggcagaaagggtgaaggagctatccagagtttcttttataagagcactaattgggccgggctcgctggctcatgcctgtaatcccagcactttgggaggccaagatgagcggatcacgaggtcaggagatcaagaccatcctggctaacacggtgaaaccccatctctactaaaaacacaaaaaaaattagccaggcgtggtggcaggcgcctgtggtcccagctactcgggaggctgaggcagaagaatggcatgaacctgggaggcgaggcttgtagtgagctgaggtcgcaccactgcactccagcctggacaacagagagagactcatctcaaaaaaaaaaaaaaaaaaaaaaaagcactaattgcctcccaaaggtccccaccccctaataccatcacactggtgattaagtttcaacatatgggttgggttcggtggttcacacctataatcccagccctttgagaggccaaggcaggaagtgtgcttgaggccagaaatttgtgaccaacatgggcaacataatgagacctcatttccacaaaacattaaaagaattttttaattagctgggcatggtggtgcatgcctgtaatcccagctaggtgagaggatcacttgagcccaggagctcaaggctgcagtgagctgtgatggcaccactgcactccagcctgggagataagagcaagaccctgttgcaaaaaaacccaaaaagtttcaacatgtgaattgggggaggggcaacaaacgttcagaccaaacgttcatgggagcccgggtcggggtggactgtggctgagttgctgattacttctcagcttcaggttcctcatcaagagcatggagataatatgtgtacttcatagcagtgactggatcttgactgtacattcaggtcaccacctgttcagaccccacccaggaccagttaggtcagagcatgggggtctaaccttgctcttctgtctggacctcatcccgaggtttcagtcacagttctggaggccggaagtctgaaatccaagtgagagatttcgaggctctaggggaccatccttcctttcatcttccagcggctccaaaatttccttggtttgtgactccttaactcccatctctgcctctgtcctcgcacaaccttctcctctgtgtcttctcctcttctgtatcttataaggacacttgtcattggatttagggccctcccacttaatccaggatgatctcatctcaagacccttaacttaattacatctgcaaggacctttcccaaataagatcacgttcatagatagatactaggggttaagacctggacatatttttggggaggatttatttaacccacagcagacatcttgcactctgttttctgattgcactgagttgggacccagcaggggtttcaagacacgtaatctcggtcacactaaagtccagccttatgacgttttataattggccagaccttgaaacttgcctgtggaaaggcccaggggatttttaacatcggggatgaaggttgaggtttataaacctctttttaaaataaggaaacctggaaatggaggattaaaatgtaaaataattctgttcttttataaagaataagtgctataacaagagtttgaatcaggcccaaaacactacagacattctagaaatacaaaacagaaatatatacatatttggaaatgttgtaagagaggtcaaccgatgtgtgaagggggcaatttagatactgaatgttcgtaaacccaagtgagaaaatgagaaagaaaatgacttcataaagaatgggtcttgggaggtgttaaggaggacagtgaggaggagggggtagaatgtgaaaagagaagtttgcagcaactggactatttcagataagaccagataatttggttcccttcccctccccacccccgttttttttgttttgttttgttttgttttgttttgtttttggctcatcttcattcaaaagcatttacctggatgttcatttctaatcttgagttttgattaaaggagtcctttcccttacctccctctagctctttgaaagtgaatccttaattataggccatgtttgagattgactagatgaaatcaacagctgtagatatgacaccagactgcaaaatatcgacacaatgttgccataaaaagcccaattgttaattgcttatttggcactgggctataacaaaaacaccctttttctgtttaatattaaaagtaaatgtagtggaaagaacatcgagctagaagtagggtaggctgggattctagtcccagccctattgccgagtgcctgtgatttgggggcaaagcattttatttttctcaggccccggtgtccttatctataaaactgagggcatgaaaccaaattaccactttcagcttaaaaattatattcttaatcatgaaaatacagcatacttctcatttctatcctttttccaaaactttatttcacaatacccaaatataattctatacttttgtcacgcaatcaggaaccacacattgatttaagcatctacatcgtttttgctgtgcaagcaatacttttccagtcttattctgaactgaagtgagctgtcagtcccgacaattctcaactgctttggaaatgcaatccactggtgttccatttttaataccgtgaagtcttgttttattcttgaagaatatgaatctgaaatgtacatgaagatgctggaatagataccatctcaaactcagctgtcattgactgaagaaacaagccaagggcagtccatgaatcagggagggagggcaaggtcgggcacagccaactggtccaggttcctcttgctcagtcagacccactgtgcaggacctgaagggcaggaaggcagctcagactatggccctggtgacagtgacaggagggcagccaaatgcctaggcagataggggtgggaccccagtgaaaccccacttccaagccaaagacagtttaaagcctgaaagccaagctacaggttaaatcctcagaccagattgagaactggcctttcctctgattgatccccacccttcacctattttaaatatgcctactctttcctaattggttatctacactgtcgtgcccacttttgagtggtatcttcactttaaccttttttgcatactcacaaaccaatcagcatgcgctccctattgttagcccataaaagccccaggctcagccatattaggggactttcccactttgggataggtaaccaccccacccccagtatcctctctttgctgagagcttgcctttcgcataataaattatactccactcactctctggtgtctgcatgcctaattcttcctggttgtgagacaagaactcggacctagctgagctaaggagcagaaaaaatcctgcatcactggtttttattttatttccctgcctctggtgcctgcccaccttgctttgtttgctgggttgtctcctacatctctgggttaccaggagcttggactcctgctttcctctacttgccgtctttgtcctatcctttacttactcagttgcttacccaagcaggaagacctccacttaggttctcgagggtttgcctgtccatattctggtcaactgcaggggggaagccatgtcttctaagcctcaagatagttgtttacgtgcaactatcagaggtaaacacccatcatttacctctgttgggaggaagtcaaaagacagatggggaaagaaaccaaatttccctgtttaactccacctcctgtattttaactcatgagagcttcttgagaggtataaatttccttgttttcagctttcaggcttgtggctgattgtgtgaacttttggtgtgctctgggaaagaacaaagcagcattcattctcttcatctttggtaatccagttaatgcacctgttttataatatgcttgatggatgtgttttgttacctgttgctgagcaacagccccaaaatttagtggcttaaaacaatgagagtgcattgtttctcacaattctgcactcttgactgggtttagctggccagatctgctcttcatgatgtgagcttggattgaaatatctcagatggccctttcactcaacgtggtctcagctgagatggctggagcatctgagacctggttgagcatgttgccacatggtctcaccacatggctagcttgggcctcctcatatcatggtgctctaaggtaatcagcctagtcttcttacattgtggagggttccggtttctggcttccagcttctcttgaaaggctaaactgacacaatgtctcttctggtacattctgttggtcaaaacaaataacagaccagtctagattcaaggggtggggaaatggtgaggggaacagcatgtcagcacagtgggggaaggaattgatggtggccatctttggagatgtatggtagataatctctcaatttattggtcttctcttttctttttatttttttccaaattcaacattatttcttattttattttttaaacatacaaaaagctgtacacagctttttaattaacacatacagcttgatgattttggacataagtatacacctgtgaaaccatcaccacaatctatgccataaatctttttttgttttttgttttttttagagacagagtcttgctctgtcacccaggatgcagtgcagtggcgcaatctcaggtcactgcaacctcctccccccagggttcaagcgattcttgtgcctcagcctcccaagtagctgggactgcaggcacacaccaccacacccaactaattttttgtatttatagtagagacagggttttgccatgtggcccaggctggtcttaaactcctgagctcaggcagtccacctgcctagacctcgcaaaagtgctaggattacaggcatgaggcactggctgctatgccataaatctatccatcacctccaaaagtttcctcctgccctgttttattattttattattatctttttactctcaatggcatgatatggtataggaacacagagcaggcaggaactagtcccatggcctcaagcagcaaatttcccagcaattccggggtgctatggaaaagcatgttgtctctgccctggactataggattggatacattacttaaatgctcctttgactgccttgggaaatgcaataatggctaacatcaattgagcacttgctacgggccaggccctatattagtctttttcatgtatcatatatattttattttattttattttatttatttatttatttatttgtttatttatttatttttgagatggagtctcactcactttgtcacccaggctggagtgcagtggcatgatctcagctcacggcagcctctgcctcttggattcaagcgattctcctgcctcagcctcccaagtagctgggattacaggcacatgccaccacacctggctaatttttgtagttttagtagagatggagtttcaacatgttggccaggctggtctcgaactcctggcctcaagcaatccactcaccttggcctcccaaagtgctaggattacaggcatgagccaccatgcccagcctcatgaatcacattctcttttttttttttttgagatggagtctcgctcggtcacccaggctggagtgcagtgatgcgatcttggcttgctgcaacatccacctcccaggttcaagcaattctcttccctcagcctaccaagtagctgggactacaggcgcccgccaccacgcccagctaattttttttttttttttttgtatttttagtagagatggggttttactatgttggccaggctggtctcaaactcctggcctcccaaagtgctgggattacaggtgtgagccaccacgcccagtcgaatcacattcttaaattagcatagtctttccaggcctatgcatatgatttcggtggtggtttccgggttggtttaggcaatggaaacacaacctggcaaaattaatagagaagattcagaaatgtcacccacagtcaaggtcacgagcccctcccttcagactcacttactcccttcagatacttattattcattctcttttccttcccccttcccagaatctcttttgtcaatattgttctactccattagcaaaacagactttatatcctattaatcaaatatttgtcccacttgagtccctttctcccctcacccccaggcccactgtcttcctgcaacagagaccaagaaggaaggaccctgaaggaagctcagggaaccctgatcttcagtgtagggttgcgtctgttctgagtggagggaagtgctctgtgaccacacatgcccctcctacacccccagggcaaagaaatgtggtcaaggtggaaggcagtgcagtacctggttctcatggagcacactcaagaaacgtgctcaggatcatgactctgataatatgactttaggctgggtgcagtggctcacgcctgtaatcccagcactttgggaggccgaggcaagcggatcacgaggtcaggagttcgagaccagcctggccaacatggtgaaaccccatctctactaaaaatacaaaaattagccagtgtggtggcacgcacctgtcatccagttacttgggaggctgaggcggaagaatcgcttgaacccgggaggtggaggttgcagtgagccaagatcacgccactgcactccagcctaggcaacaaagtgcgactccatctcataataataataataatagtaatatgactttaggtaggaccatcagcaaacccagagccagtacatgccctgaaaaacccaccgacgcaacatagcatttttcagattgtattttttaaatgtttataatatgtcatttacataccataaagctcacccattgaaagcgtacaacttggccgggtgcggtagcgtatgcctgtaatcacagaactctgggaagccgaggcaggtgtatcacctgaggtcgggagttcaagaacagcctggccaacatggtgaaatctcatctctactaaaaatacaaaaattagccaggtgtggtggtgcgtgcctgtaatcccagctacttgggaggctgaggcagaagaattgcttgaacccaggaggcggaggttgcagtgagctgagattgtgccactgcactctaaacagagtgaaactccatctcaaaaaaaagaagaaagtggtgtataattcaacgtttttttcatatacttatctagttgtgagccatcattttaatctaattttagaacattttaatcaccccaaaaggaaattttgtttctgtttgccgtcattctgcataccactcccttcccccagctttaggcaaccactaatctgcttactttctccatagatttgcctcctctggacatttcatatccatggaattatacagtgtggcctttggtggttggcttcttctacttagtagcatgttttctgaagctcatctgtgttggtgcatgtatcagtacttcatttcttcttttttttaaatttcaacttttagatacagggggtacatgtgcagaatagttatatgggaatattgtgtaatgctgaggtttggagtatggatcctgtcaccctgtggtgagcatagtaccccatggacatgatttcattcttttttatggctgtgtagtattccatgggcacctagattgatttcatgtctttgcttttgtgaatagcacagtgatgaacatatgagtgcatgtctttttggtagaatgatttcttttctttgggcatatacccaataatggggttgctgggttgaatggtagctctgtttcatatgtttgttggccacctgtatgtctttgagaagacttcatttcttcttatggcacagtaatatttcattgtatggatataacacatgttgtgtatctgatacaggcaagcccctaaatgggtgcttagcccaggaggttcttggcttcacccaggaaagaattcaagggtgagccggtggtgttaaaagttgaagcagtaggccgggcgcggtggctcctgcctgtaatcccagcactttgggaggccgaggcgggtggatcacgaggtcaggagatcgagaccatcctggctaacacagtgaaacccccgtctctcctaaagatacaaaaaattagccgggcatggtggcaggtgcctgtaatcccagctactcggaaggctaaggcaggagaatggcgggaacctgggaggcggagcttacagtgagccgagatcgccactacactccagcctgggcaacacagcgagactccatctcaaaaaaaaaggacaaaaaaaaaaaagttgaagcagtagcagcagaggtgctgctccttgcagagcttgactgccccctaagcagtgtgcccagaataacagcacagaggcagtgctccactcattttatagtcacttttaattatatgcaaattaaggggtggtttatgcagaaatttctaggatgcgggtggtaacttccacgttgtcaggtcattgccatggaaaggggcagtaacttcacagtgttgccacagtgatggtaaatgacatggccgcttcttatggaaacctgcttccgccctagacctgttttagctagccctcaatttggtccagtgaccgagcgagcttctagaatcaagtcttcatttctcagtgtttgttttgttttgttttttgtttttttgttttgagatggagtcttgctctgtcgcccatgctggagtgcagtggcgtgatcttggctcactgcaacctccacctcctggattcaagcagttctcctttcccagccttcccgagtacctgggactacaggcagatgccaccacgcccagctaaatttttgcatttttagtagagacggggtttcaccatattggtcaggctggtctcgaactcctgacctcaggtgatccacccacctcggcttcccaaagtgctgggattacaggcgtgagccactgcacctggcctcatttcttcctatggcataataatatttcactgtatggatataccacctattctgtatccattcatcagtaatgcagttgctgggtagctctgttttaagttctttgagaagtctccagactgctttccacagtgtggactaatttaccctcccacctacagtgtatcagcattccgttttctccacggcctcaccagcatctattgttttttgactttttaatgatagccattctggctggtgtgagatggtatctaattgtggttttgatttgcatttctctgatgattagtaatgctaagcattttttcatgtttctcggcgacctgtatatcttcttttaagaagacttcatggtcaggcatggtggcttacgcctgtaatgccagcacttcgggaggtcgaggcgggcagatcacttgaggtcaggagttcgagaccagcctggccaacatggtgaaaccccatctctactaaaaatacaaaaaattagctgggcgtggtggcgcatgcctgtagtcccagctactcgggagtctgaggcaaaagaattgcttgaacccagaaggcggagattgcagtgagccgagatcatgccactgtactccagcctgggcgacagagcgagactccatctcaaaaaaaaaaaaaaaagaagaagaagactttgtttctttgtatgccagaataatatttcattgtgtggatataccatatattgtgtatccatcaatcagttcatggaaatgtgtattgtttcccttttttgtggctattatgaattagaacatccatgtacatgttttgttttttggggttttgtttgtttgtttgtttgtttgttgagacagggtctcactctgtcactgaggctagagtgcagtggcatgtttacagcttaatgcagcctcaatttcctgggctcgagtgatcctcccaccttagcctctcaagtagctgcgactataagcatgtgccaccacacctggctaatttttgtattttttgtagagaaggggttttgccatgttgcccaggctggtcttaaactcctggactcaagtgatccacctgcctcagcctcccaaagtgctagggttacaggcgtgagccactgcacccagcccatgtacatgtttttgtgtggatatgtgttttcaagtctctcgggcagatatctaggagtgaaattgctaggttaaatggtaaccctatgtttaatcttttgatgagctactgaaatgttttcaaagtggccacactatttatatttctgtcacaatgtatgagggttccagtttctccctatctttgccaatgcttgttattgtgaacatagaatttaactagtctttcacttaggtatttaccaaattttggctaagattctgatgtcccagccacatgtgtgtgatacgtcgaatagggttgaagcattcactcaacaagcatgtattcaacatctgtgatgtacccacctgccagacccatgacaggggaagcttcagaagcagaaaggaggagccctcattctgagccacccaggaaagggtccttggaggggatgacactgaagtacttttttttttttttttgagacagagtctctgtcacccaggctggagtgcagtggcacaatctcggctcactgcaacctccgtttcctggattcaagcgcttctcttgcctcagcctccctagtagctgggattacaggcatgcatcaccatgcccagctcatttttttatatttttagtagagacgggcttttaccatgttgcccaggctggtctcaaactcctaacctcaaatgatccacccaccttgtcctcccaaagtgctgggattacaggcctgagccaccgtgcctggccaagtgtttttttgttttgttttgttttgtttttaatacagctgggatcttgctatgttggccaggctggccttgaacttctggcctcaagcaatcctcctgccttggcctcacaaagtattgggattaaaggcgtgagccactgtgcccggcccctaagttaagtcttgaagcaaggaaaggagaatcaggcagagtgcaggacttggtgggggagaaggaacttcaggaagggggaccagtgcctacctaggaggttccagactcctggggctttggagaatgaggccagcagaagcttcttaaggctcacgagagaggtgtggctttgggaggctggtccggaaaagatgccagaaaaataagtaataacatcaaaggccttgtacctccttcctgccagggcatattacttttatgctacactcatggtgccatggacagattttgaggaggggagtttacatctgggaggccaccgtggcagcagagtggggaatggtggatggagagattgagaagaggcaggagggcaagcattcacccgctactttgatgaaggcctggcgtcagctggcatggaagttggccctgggagtgcactgtgttttttaggggagctacagttgtggaagtggtcaccatagcaaaaaggtcctaacagaggaggcagatctgtaagggaagtcaagggcagcctgaaagccctctttagaggccagtgccagatggccttggcggagccacggccagatctgagagaataaacctgtctttatttgtaagcagcctgcttttacctcccaagcccacccctgagacacagtctggtctgcattaaaagggctggggctgtcccagccaatttgattttgtgtctcatcctatctacttctcaacacaggaccccttgactgccaggtttctcctgggaggggagatgccaattttctgcttcagcctgtagactccgctgtgtgctgtgaggttctttcccttcctggggtccaacatccccgtgaacaggaccaggactagccccaaacccacagctggacagcagatcctggagcagctgcacgtcttctttatgataatgaaaactggctgggcccggtgacccacgcctttaataccagcactctgggaggccgaggtgggcagatcacttaagcctaggagcttgagactagcctgggcaacatggcaataccccatctctacaaaaaatacaaaaattagccaggcatggtagtgtgcacctgtagtcccagctacttgggaggctgaggcaggaggattacttgagcctgggaggtcaaggccgcagtgagccatgatcctttctcaaaaaaaaaaaaaaaaaagtactgaaaattagctcatacatacatatttaagcataattactgggttttatatagtttacatgttctaaggtatctctgaaaaaaataatcttctaatgaaataatcagcaaatgattggctaatggcaatcattagacaaatattggatgattaaacttaaaaaaaaaaaaaaacccttgctgggcacagtggttcatgcttgtactttgggaggcctagcactttgggaggccaaggtgggtggatcactcgcgttcaggagttcgagaccagcctggccaacatggcaaaacccggtctctattaaaaatacaaaaattagctgggcatggtggcgggtgcctgtgatcccagctacttaggaggttgaggcaggagaattgcttgaactcaggaggcagaggttggggtgagccaagatcaaaccactgcactccagcctgggtgacagagcaagactccatctcaaaaacaacaacaacaaaaaaacccttttacctgtttttttcattcttgtaattgaagtataatacaaatcttaagtgtaaaactcagtgaatgtgtacatgttacatccaggtcaacatataatcatcccagaagtttccttcatgtccctttgcaccaagcccccacccccaaagagattactgctcatctaacttttatcaccatacataaagttttgcttgttcttgaacttcaatttgaatcatacaatgtatatgctattgcatttggctacttttgcttaacatagcatcagtgagagttgtacacgtttttgcatgtatcagccatttgttctttttcattgctgtgtagtattccattgtgcacctagaccacaatttatctgtctagtttcttgcttatgaacatttggactgtttccagtttttgcctcctgtatttaaagctgtcgtgaggccaggtatggtggctcacacctgtaatcccagtactttgggaggccaagaagggaggatcacttgaggtgagaagttggagaccagcctgggcaacatagtgagacccatctctacaaaagaagaaaagaaaaaattgaggccaggcacggtggctcacacctgtaatcccagcactttgggaggccgaggcgggcagatcacgaggtcaggagatcgagaccatcctggctaacacagtgaaaccccgtctctactaaaaacaaaaaaattagccaggcgtggtggcgggcacctgtagtcccagctactcgggaggctaagacaggagaatggcgtgaacccgggaggtggagcttgcagtgagccgagatcgcgccactgcactccagcctgggcgacagagcgagactccatctcaaaaaaaagaaagaaagaaaaaaagagaaaagaaaaaattgagacacaatataattcacccttttaaataaatgtgcaattcagtggtttttcgcatatgcacaaggttgtgcaactgtcaccactgtctaataccagaatgttttcatcactccaagaggaaatgttatatccattcataatcactctacatcccttcctttcctcaatccatgtcaactactaatctactttctgtctctatgtttgtttgtttgtttttgagatggagtttcgctcttgttacctaggctagagtgcaatggcgcaatcttggctcaccacaacctctgcctctcgggttcaagcaattctcctgccttagcctcccgagtagctgggatgataggcagtaggtgggattaccaccatgcccagctaatttttgtatttttagtagagatggggtttctccatgttggtcaggctggtcttgaactcccgacctcaggtgatccgcccgcctcagcctcccaaagtgctgggattacaggcgtgagccaccacacccagccctatttctatgttatttaatacttattcctgacatttaataatgatggtcaaacttttaatatatcaatttctttgattttttttttctaggatcctaagcacttcaagtcagagaagacaggacggggacagttgagggaaggctggagagatagtcatcagcctatcatgtgctcctacaagctggtgactgtgaagtttgaggtctgggggcttcagaccagagtggaacaatttgtacacaaggtaagtggtccaacagcagttcctgggctgtggacaaggtaactgtctatattgccaaattggagtccatgatacacaacaggtgcacaaatacatcaggtcactgcatctcaaaaacactttttgggccggttggggtggccaacacctgtaatcctagcactttgggaggccgaggcgggtagatcacttgaggccaagagttcaagaccggcctggccaacatggtgaaaccctgtctctactaaaaatacaaaaacattagctgggcatggtggtgggtgcctgtaacccagctactcaggaggctgaggcaggagaattacttgaacccgggaggcagagattgcagtgaaccaagatcgtattattgcactccagcctgggcaataagagagaaactctgtctcaaaaaataagaaataaaaataaaaaataaaaaaataaaaaatactttttggatgaaaatgcattttatgcataggttcaattttcttccactaatagatgttttatgccccatctctcattctgtgacctccatgtctattaggcaagcgtatttgggaaacacacttctcagtttggtattggactcatctactcccagacagagaaacttgggaaacagccaaagggcttatctgtgagcacagcccctaaggttaattgccacccaaaagatctacaaatgtaagcacctaagcagaagatgcccagaggtagaacaagaaatcccaatagtcccattagacagtataccccagcatttctgcttctttaataattctgttactaaagtagccaggtgtggtggctcatgcctgtaataccagccctttgggaggctgaggcaggtggatcacttgaggtcaggagttcgagaccagcctggccaacctggtgaaaccctgtctctgctaaaaatacaaaaaaattagccgggtgtggtggcacgtgcctataatcccagctactcaggaggctgaggcagggagaattgcttgaacccaggaggcagaggttgcagtgagccaagatcgtgctgctgcactccagcctgggtgacagagcaagactccatctcaaaaaaaaaaaaaaaaaaaggaaataataagaataattctgttaccaaataattgttaacagcctcgggatgcagatttcaattgtaaacctactttggctaaacatgttcattttggttttttgttgttgttgctgctgctgttgttttgagacggagtctcactctgtcgccaggctggagtacagtggcacaatctcagctcactgcaacctctgcctcccgggttcaagtgattatcctgcctcagcctcccgagtagctgggactactgggaggtgcgcacgccaccatgcccagctaatttttgtatttttagtagagatggagtttcaccatgttggcagggatggtctcgatctcttgacctcctgatctatctgcctcggcctcccaaagtgctgggattacagacatgacccaccgtgcccggccggcatgttcattttgtagcagaatcccacttggtgaagagtcatattttctcagggtttctaacatgactctgtccctcatgggagaaaaaaatgggaaatgcaatgttgagcattgccctttgtagctgctctcattttcataagaataaatactacccaaattgtctctacattccagataggctggttatctgtttatttttccacttaaaaactgataagagtagcttgccaaaattattttggagtcactggaatttaaccttaatgcactgagctttttgttacttagatggatttgtctattgagattgggggccagttaacaataaaaagtttaattctggaatttaggtccaagaactagactgccagtctcttgaaccctcataactcaggctcacggtaatggcagactctggcacaaacatgagagccctgggtgttttcttgaacagagaagcatgccactcctttcccgtgctccagaacccagccagccagccaggagccagaatgaaatgtgatacgtagaaatcaagctccaggatctcctgttttcctcctgtgtcctgattattgcacaggaaagcaattgcagctcccaaagtaaatgttttccagcctcagctttgtgtctatctaaggcagtgtcttccttggtttcccacagcatccctttttgtgtgtggctttttaaggtaaaaagacttcctcttactagggccactatcatagtattattttgttttgttttgtttttttgagatggagtctcaatctgttgcccaggctggagtgcagtgacatgatctcggctcactgcaacctccacctcccaggttcaagcaattcttgtgcctgagcctcctgagtagctgaggcacaggtgcatgccaccacaccaggctaacttttgtattattagtagagacggggtttcaccatgttagccaggccagtctcgaactcctaaccttaagtgatttgcctgcctcggcctcccaaagtactgggtttacagtcgtgagccaccatgcccggcttcatagtgtgttttccactcacaaagcatatttaataaggcagagttgtcagttaaaaagagaataatacaaaataaaaataaggctgggcgtggttcacacctgtaatcccagcactttgagaggccgaggcaggcagatcacttgaggtcaggagtagttcgagaccagcctggccaacatggtgaactctcatctctactaaaaatacaaaaattagctgggcgtggtgacaggtgactgtagtcccagctactccagaggccgaggcaggagaatcacttgaacccaggaagtagaggttgcagtgagcctaggtcgcgccactgcactacagcctgggggacagagcaagactctgtctccaaaataataataataataataataatttaaaaggccatatttatattgccccagggtccactgtgtttcttttctcacagatgactcaggctagttttgagaatctgtttcctgaaaatacctgtaagatttatgccttgccctttccaaatataaggaagtgttattgacactccagaaacgcacctgctctcgcacgtgagtcgctaatgagtatctgaggctagcatttgcatgggttgaaggtgccagggatgcctttctctgaacacctttgtttttttaagaatctattcacagttaaggggaaaaaaatgttcgaaagcgagccatgagcacattattgaattctggtttccagccgacagctgtgttgtgcttcgtgtaatagggtacatttactgatgcctcgatgctgttcttttgatttccatgaatttgagacactcagcactcaagtgtgtatagctgtgtgttgtttcttgtattcattatgtgtttcctactttcaagtcataaaagcctcactagatatccagaggcctggagtcataaacacttcattataaatgctttccttgtttctgcaaattcactgaattaaaatccttcatttattgaaacatgcttgaaccttccacgagaggtttttcacaatcactggatttgtttggcaggaagaaaggaatgttacagggatactgtgagtatccaagaaatgtaaaaagacatatttacccaggatggaaaagaataccatgaaataaaaacacatgaacagtatctcacacacgcagacacacacacacacacaaatggtatatactattttccttagccttctattgccattatgtgtcaccataagaaacaatttcatcctttttgtgtccagtcaagcttgtcattcccattacgttctattctagttcaggtctcttttttcatcctttcaatggtaaacggcctttttccccctcttctattacatgaaagtcaaacctaaaaggatatttacttatcttgtatctcacacattcatttatgcttgtttaaaaattgaggccaggcgtggtggctcatgcctgtaatcccagcactttgggaggccgaggcaggcagatcacaagatcaggggttcgagaccagcctgaccaacatggtgaaaccccgtctctactaaaaaaatacaaaaattagccgggcatggtgacaggcacctgtaatcccagctactcaggaggctgaggcaggagaatcacttgaaccagggaagcggaggttacagtgagccgagatcgcagtgagccgagatggcgccactgcactccagcctgggggacagagcgagactccgtctcaaaaaaaaaaaaaaaaaaaaaagataaaaagaaaaattgaatcaatatttattttttaaataattttttgtgggtacatagtaggtgtaaacatttagggggtacatgagatgttttcataaggcctgcaatgtgaaataggcacaatgtgaggaatggggtatccatcccctccagcatttatcctttgtgttacaaagaatccaattacactcttaagttattttaaaatgtacaattaaaaaattgaatcaggctgggtgaagtggctcacacctgtaatcccagcactttgggaggccaagacaggtgaactgctcgaggccgggagtttgagaccagcctggacaacatggcgaaaccctgtctgtactaaaaatacaaaaattagccaggcatggtggtgcgcacctgtagtcccagctactgaggaggctaaggcacaagaatcgcttaaacacaagaggcagaggttatagtgagttgagattgcaccactgcacttcagcctgggggacagagcaagactgtctcaaaaaaaaaaaaaaaatcagtatttaggatatgtcatcagaaaagagggaatgttaagtgctgttcactttttaggatatgtcatcagaaaagagggaatgttaagtgctgttcactttttaggatatgtcatcagaaaagagggaatgttaagtgctgtttgcttagaagtgacttgctgtcggccaggtgcggtggctcacatctgtgatcccggcagtttgggaggtcgaggtgggtggatgacgaggtcaagagatcgagaccatcctggcaaacatggtgaaaccccatctctattaaaaatacaaaaattagccgggcatggtggcccacgcctgtagtcccagctacttgtgaggctgaggcaggagaattgcttgaaccctggaggcagaggttgctgtgagccaagatcgcgccactgcactccagcttggcgacagagtaagactctgtctcaaaaaaaaaaaaaaaaagtgacttgctgcctagaaaagtgttctagatttccaaaatttatgacctcctggcaccagtgagacacaccctcccacagatgaaaagtagatgctgttttagttaaaaataaatggagagaaaaacttcaaggtaattaacctagatatttatttgtatcactgctgtgtgactgtcaagtatttgtcattagtttgtacacacacccagccctactctcaaataagacaaagagatgaatatactgcaagtgtgtgtacaccatggggaagggctggaggtgtgtgagcactataggacctataggcagcctgtaattgtcatcacctatggacagagggattaagaactctgtaatcaccaagatccccagaattgttaacaacttgtcttccagatagttttcatcaaagatgctattatttcagtctccttcttttactttttaggtggtccgagacattctgctgattggacatagacaggcttttgcatgggttgatgagtggtatggtaagtcaatttctccaaaataacttgtagaacaacttcatgttgtctcgggctttctgtccatttggcttcaactgctacctagaaggacaacaacaaaggcaaggccgctgcttcctgtgttggaaatagcactgtctgccaagcataatgaagatgtaattatagaagcttggtctaaaataaccacagaattattgactaagtaggaacctcaggatgtttgatgcttacatagttgatacgcatggctccatcattctctgttagatgggtttcaaacccatcctaatttatcccaaacttcaagatcaaagctgtctgaagcatcctgtcaagtaaaagcagtcctttgattcagacaacatttgaaaccaccccttgccgggcgcagtggctcacgcctgtaatcccagcactttgggaggccgaggcgggcagatcacgaggtcaggagatcgagaccatcctggctaacacggtgaaaccccgtctctactaaataatacaaaaaattagccgggcatggtggcaggcacctgtagtcccagctactcaggaggctgaggcaggagaatggcatgaacctgggaggcggagtttgcagtgagccgagatcgcaccactgcactccagcctgggggacagagcgagactccgtctcggaaaaaaaaaaaaaagaaagaaagaaactacccctcaacaaatatatacaggttctgcaagaatttaagggcagacagaggcataggtgccccgttcatcctaattgaaactattgttctggcttttttttcatgatctgggaagagttaaacaatttctacacatttgcagcaaatgaaaacaaggttagcttcatcccatgatggatggaccatccttcccaggtcctcagcagtcttgttttgtccacatgaattttctgcactcccagaatcagtcatcagatggctaccgtccttggctataaatagaaaggaacacgccccaccggtgacttaggttagatctgattttcaggtcgattgtctaatgaaatgcccttctccttggccttttccaaagtcacattaaatttgttctgagtataacctagattgcattttggtccttttctgtcattgtttcaccaactccctcccttttctgagcagaaggtaccaaagtaaaaggacacgttagacggaaggggcaaagacagtcattattattaatattgttagctatttctgagccacatttaaaaggcatggttctataagctatgggcttttcttttttttttctttttttcttacctccttttgcagttttcccagatctgcaccttctgaagagcaaatgcaccttcctgggtttgtccaaatgcagatcatttatgctctcttatcacacacccacagaatgccgctctcataccgcaaaagcactggcttgccacattgtcatgtagtctcccagagacctgtctatttctagttgtgttttgtgaggcaggcaggagagtctcctgtgattacttcctctgatccttaaataaatctttctggttgtttttttctggggcgcttttctccgattctcagagggagcacagaccccaagaaaggataagaacttctggtctctcccagcttgtgctcctcagagctcatggtttccttgctaccaacaccaaggaaatatcaaaaggatatttaaagaatcataggtgcaaactgattagaagtttggcaaaaagagaggtacctgaagggccaaaaatctgccactttgaaaaccaacacacagggcacttggataggtttctctctgttgccagagtgccaaagaagatttttcagctaaaagaatagccgggctctgatcaagaggacagaataataaaaagggtttgattagaggcaggatataggaagaaaacccagtgtgggtgggtatctagtaaatgaaaggccaggaaggcgatggggcctgacttttccatctcagctgagcctagggcaaggaagagacttagggacttctttttttttttttgagacagagtctcgcactgtcgtacggactggagtgcaatggcacaatctcggctcactgcaacctccgcctcccaggttcaagcgattctccttgcctcagcctcccaagtagctgggattacaggctcccaccaccacgccctgctaattttttttgtctttttagtagagatggggttttactatgctggccaggttggtctcaaactcctgacctcgtgatccgcccacctcagcctcccaaagtgctgggattacaggcatgagccactgcgcccggccttagggacttctaataaaagacttagggacttctaataaaaattgaaagaaaaaaaaaaactgccaggcacggtagttcacacctgtaatcccagcactttgggaagcctaggatggaggatcacttgagcccaggaattcgagaccagcatgggcgacatagcaagacatcatctctacaaaataaataaataaaattagccaggcacagtggtgcatgtccgtagtcttagctattcaggagaccgaggtgaaaggatcacttgagcccaggagctggaggctgcagtgagctatgatcgcagcactgcactctagcctgggtgaccgaacaagacctcgtctctttaaaaaaaaaaaaaaaagaattctgggattacaacaggagcccaaggctagaataatgtatcaaaggaaacaggagatctccccgaatctggagaccttcaaaagagagcacttatttacttaggatgagtgaagtggaggcatttaacaactaaggagtctattgtgcaaaaaaccttttccttatctgagcacaaaacaacactgtgggctttagtgaatgtggatcattaggacaccttgcactccccagagtgggtctccccctgcatacactgacatagccccagccaaaacaagcagccttttcactcagcagtggtctgagaactacaccgttaatttcatgtaagcttctgcaaccatcagtacccacagctgagctgctgaccaggaaaacagtggctccttcatcacacagatgcagacactcagtgaatcaaatgaatggaaatgactcctgtccacagagtgccttctcagtcccatattcaaagtaattctgggaactgtgggccatatgtgccactggtacccaggctaagcgcccaccagcattacccttccactccattttggggtacctgaagtggcctatttttatttgttctggacaggctcagtgagactctcatggaaacatggaaacatggaaacatggaaaagatccaaaataaatccttgcctatagctatagcgtctagcactggttctcaaagtaaggtccctggacctgcaacgtcagcatccctagggtacttgttagaaatgcatattctcaggccccaccccaaacctactgactcagaaactctgagggtctagcccagcaattgttttaacaagccctccagatggttctgttgctggctaaagtttaagaactactggcttatagcatgggctataaaccagactgggacattgggttgtaaggaccgtttaattgattcaatccaaataggttaactagagaatcatagctgtctgcagggccaaccacactccagcctgggcgatagagcgagcctttgtctctaaaaaacaaaaaataaaatcaattttaaaatgattgcaggaacccaaattcttacaactctgatttcttgtgagaattagaaaaaaaagcttccctttagacagatgaattagaaaaaggtgccccttctgggcagactcagcaggtgctctgggcttagggctgaatttgagccccatttgcctcctctgctgtgtgttcatacagtgcacaaactgtacacactgatgcatgggtagctctagatgtctttctctctaattagacacaccacctccagtgcttaattaagagtcaagaaaaaaggacattgttgagggtagtgatcatttgtcagccaaggatgaattttgtatctcttctgagtttcagcatttggctgtcacgaaactgtttccctaaagagattttattctgttcgtgttcattgtaaagtgtaaccatttccatattggaggagttgagtgtgtctttcaaagccgtgattggtctttatccatgagccttgggtctctctgcacgactagaacgctaatcagagaaataacaacaacgtatttcaggagatggggtgagagggaaggtggataaaaataggcagcccagtttcacaaaggcttggttttgctttacaaatctgacagtgttttgagaaaggaacacagaacattgccagaaggagcctatgattgaggtgaacctcacgaatgtctttgaaaacctgactctaaccaaaaagtatgagggagggagagttctggctgctgtagacgacactacctcatgaaagtgacttagaaatcagcctggagtccctagagcaggtctaacaatgagggaggcaagattaaaatggagaaagaagcctgctaggggttgcatgagctggttgagttcaccaagccagattttccaacgcaacattttatgtgtgtgtgcttgtattcgtttatctggggagagaatgaataactttccatcagattttcagaggaacctgtgaacccttcccctgcctactccctgctcccaattaaaaactacagaaaaaaatcacaactataaggctggcacggtggctcacacctgtaaccccagcactttgggaggccaaggcgggcagatcacctgaggtcaggagttcgagaccagcctggccaacatggtgaaactccgtctctactgaaaatacaaaagttagctaggcgtggttgcgggcacctgtaatcccagctactcaggaggctgaggtaggagaatcgcttgaacccgggaggcagaggttgcagtgagctgagatcgcaccattgcactccagcctgggcaacaagagtgaaactctgtctcaaaaaaaaaaaaaaaatcacaactatagattacagttctagatcttagtggtctgaattatgtggaaaaggtatacaccacacttcgaggattggctactttcactacaaaaaaatggagtcaccctaagctttttgtaagaagcatgtattgaatttgtaatcattgtaaagggtttaaaaaatggcatttctcaaaggatggctaccattttgctggagccaaagaagtatccattcttatttatgatttctggggcctccctgacccaactacttgttcaagacttttattttgacttagaatgatgtaaaaatgacttctgttttggtgaaggaggctgaaagtgaacggaaatgtttgtagagggaaataaagtataatgtgccatttcacagatcattgaattagaacagaagactcccctttttaaaatgtttgctgctgcaactgtgtggtacaatgaaggaaaattcacgcttgcagatgctttgttcaagggcatttgtagtttccatgtgtgttcaactgacttctaaaggcctttcaaacatatgatcttgcctccacttcctgtgaaattaacctcctttctttaaaaatacaatgatttaaagaaaattgccaccataaacaaagctaaaagactaggggaaaatatttgctgcatatgtagtcaacaggattaccatctataatatataaagaggtcctataaattgaaaatttggccaggtgtggttgttcatacctgtaatcccagcactttgggaggccaaggcaggagaatcactcgagctgaggagtttgagaccagccctggcaacacagggagaccccatctctacaaaaattaaaaattagctggacatgatggtgtgcctgtagtcccagctgcttgggaggctgaggtggaaggaccacttgagtctgggaggtcaaggctgcagggaactatggtcacaccactgcactccagcctaggtgacagagcaaaaccctatctcaaaaaaaaaaaaaaaaaaaaaaaaatcagtcactcaagaaaatggtaaaggatatgaataagtaaatcatagaagaagaaatacaaatagccaataaacttactagtaatcacaagaaccgtaatgagaaaaacaagaaaataggacatttgcccatctgatagcaaaaatttaagagtgattatatccagttttcaatataaaatgataatccaatttaataaaatataccatagaaatgataagcacaaacaacttatgacccagccaatccacttccagaattttattctggaatacacatgaggccaggtgcagtggttcatgcctgtaatcccaacactttgggagaccgaggcaggcagatcaccttaggtcaggagttcaagaccagcctggacaacatggtgaaaccccgtctctactaaaaatacaaaaatagttagctgagtatggtgacacgtgcctgtaatcccagctactcaggaggctgaggcaggagaatcgcttgaacctgggaggcagaggttacagtgagccgagatggcgccactgcactccagcctggggacagagtgagactctgtctcaaaaaagaaaaaaagaaaaagaaatacaaattgcccatgaatacatgtacaacaagtacaaagctattctgtgtggtggtgttcatataagctaaaaattagtctcagtgtaaatgtttactaacaggattatcaattaacaaatcccctgagaccagagcctctttgccaaagtggagctgatggttgaggaggagattttggcctcagcccagtcactggcagaggagaacgttctactcaggccccatgcagtatgacctcacgccctgagataagagtctgggatctgatctctcctcacctgaaggagagcaagaaagagaagaaaagaaatggcctctccagagggcaaggaaaggaaatattgtcccactgaagtacagtgagcagggcatgtgtgttcccaaaatacttcccagggctgtttaacctctgatagcagagtctcaaagatattaggatgcactttctttatcagaagaaataccgtaccagttgcaatagtctcttaaattaggcaattatccccagtattgctggcttaaggagtctttatgtaggaaaccttatttaggaagagtaaattatgacctttcacaatctataagtgaagggctgactgtttaccaatgtatttgcaaagtaattgacatgggcttcctttaattaagagtttgggccgggtgtggtggctcacgcctgtaatcccagcactttgggaggccgaggcgggtgaatcacaaggtcaggagttcgcgaccagcctggccaacatggtgaaaccccgtcactactaaaaatacaaaaattagctgggtgtggtggcgggtgcctgtaatcccagctacttgggaggctaaggcaggagaatcgcttgaacccggaaggccgagtttgtggtaagccaagatatcacaccattgcactccagcccgggtgacaagagcgaaactgagtctcaaaaaaaaaaaaaaaaaaaaaaaaagagttgatacacataagcatttgtttgctggaagcaaagaagtctgaacctaaattgtttgaagtcactctgatcattgaaaatcaatcaataataaagatgaatcatcattactgtataatctgtcattgggcacatgtaactgaatttactaaaatattgatttctacaaagattttgaggtcatatatgttgcaaaagctagacagtgcattttaccagctaacctgaacaggagcattttcacttgattaggatttccataaatttctgagaaatactgaaaatatttacatcatgttcatacacatttatagtctgtgaggatatttcaggatttagacaaacatattttccttcacagcagggaccatattatcaccatcttttagagaactactctactaggaatgttcattcctatgtggcaaaattgggagattttcttttatagaattttctgaaatttcatttcttaactctttgtttaaaaaaaataataggggatggctgggcgtggtggctcacacctgtaatcccagcactttgggagggcgaggtgggcggatcacttgaggtcaggagttcgagaccagcctgaccaacatggtgacaccccatctctactaaaaatacaaaaatcagccgggcgtggtggcacacaccagtaatcccagctactcgggaggctgaggcgggagaatcacttgaacccgggaggcagaggttgcggtgagctgaaattgcaccagtgcacttcagcctgggtgacagagttagactctgtctcaaaaaaaaaaaaaaaagaaaagaaaagaaacaggggattatgtttctagagtgaacagaaattctggaaaagtctatcttctccttaccaattccaaattgacggtatccatctcataatgatccaaaataacaaattttttttttttttttgagacagagtcttgctctgtcgcccaggctggagtgcagtgacatgatcttgactcactgcagcctccgtctcccaggttcaagcgattcttgtacctcagcctcctgagtagctgggggttacgggtgtgtgccaccatacctggctaatttttctatttttagtagagacagggtttcaccatgttggccgggctggtctccaactcctggcctcaggtgatccgcccatctcggcctcccaaagtgctgggattacaggcataagccaccctgcccagcccaacataacagattcttaaataatgtttttttttttcttttccacaagcaacgcatatttgatgtagaaaatttcaaaaatgtagataagcaaaaagaaggaaattaaaattacctgtaattctaactcttcaaaataatcactgttaacattttgaaatatatcctttcagtgtttttttaatgtagataatggttttctgactaaattgatttcatatgctatatacagttctttttacctattttttatttaacaatagattaaggatatctctctaggattaactattcttctacctaatttttaacaattgcatagtgctatcagtcccctgggttgttttcaatttttcattattatgaacattgctgaacaaggcagcaatgaatatctttgttgttaaaccctttttcacatccataaaatggatacatctttgaaagcccatagtcacaaagtttaagcccctatcttgacgttgagctaattcaagatgaagtatgatttctgtggggattcaatagaacaaaaaaacctataactccttggcttttgttttccaaattactgtcatgcctgttgggatggtggggggcaccccctaatgacatatgtgtagagaaacttctttaaattttcaactcctagctaaaagtgatcgtctagtattatttcagatatatttgtgtttaagaaatgttgataagcagccattgaaagtgattgtactgaaagaatgtgttgttattattaactaagatgcatttgttttcatcataaagcagcatctctttattgctttttggttacctcgattttctaaaagaagagcatgctccttgcttggccaagctgctgcttagcattcttgatacttacattgcttatggaccgcatttgcgattgaggatctccaggtatacctgggaatgatcttctgcataaaatagaccaggtctggatttagaggcacacagcatcttggtcccagaccacagtgaattaaatcataaactcctggcaaatctgccctttggaaatgaagaggatctcacatgacacatggattgatataaaaagacaccaaaccacatgatgcagaaaatacctaaggaaaaattccagctgtgaatgcccactctaaatccccactaagccaattagtggtcagggtggcagaggaagcactttgttcggcataccatcattggtaaagagcatgaagttccgctctgccaagagagtaacagaggaatgcctacctgggaatattgctgataaaatgtaaaataaccaaggagccgggtaggggtgggggtaaaatgacagaagtatttgaagtgagactaattgttatttatatgcatttcacatactgaaggtggatgggttccttatttaagttttttttgtttggttggttggttttttttgagacagggtctcactctgtcgcccaggctggagtgcagtggtgtgatctcagctcactgcaacctctgcctcccgggttcaagtgcttctcctgtctcagcctcccatgtagctgggattacaggcgccctccaccatgcccagctaatttttgtatttttagtagagacggtgtttcaccatgttgtccaggctggtcttgaactcctgacctcaattgatccacccgccttggcctcccaaagtgctgggattacaggcatgagccaccatgcctggcctgaacatttttatcagttggattaagacagggtttctcaactttggtactattgacattttggaccagataattttttgttgggggctgggggtcctgtgcattgtaggatgctccatagtgtccctggaatctgcacactagatgccagtagcaccccttccctagttctaacaaccaaaaatgtcacaaaattgtcccccgttgagaaccactagattaagagatcattatcctgaaatactgaaaaactgcagacttgggccaaaaatcatgtcatgtgccattttatttttagatcagtgtgggtggaagtagtgccagccatcttcaagctgttagccaagacttgaggttcagtatagacctgcactctctgacgccatgcattctgtgcaaatttacatctgtgtgcaagttgcaccaaatctcaattgtaccagtgaatatcattgctctgccttctacatcctgcctcctataacagcaatgaaagtgtcctttctgttgttgaatgcattgatttaaacaacctctaaatctattttgaaagctatgtggaaggtaagtattaaaccaagcaaaactgaccctctgtccccaatgggatcttctaatgatgctttaggagatctcaggctatggtactgcccacatgctaatactttctacccaaacctagctcactttacaagaatcacccctaaataatttccactcttctctgttctaagactattttgacttaacttccttgccctcactccccctttggttggtttagctaactttatgacttactcatcataaagttagacaagtctctgcttttttaaacctccttggctactgctcagctaccatctttccctaaagtgtccccattgaaagtttgcatctaataacggaagttgccaacatcttgacctctttcagatatgacaatggatgatgttcgggaatacgagaaaaacatgcatgaacaaaccaacataaaagtttgcaatcagcattcctcccctgtggatgacatagagagtcatgcccaaacaagtgtacgtagaatttttaaaacatgttgcccaccctttcacaaatgcacatgtaaactgatctgggaaatactgcagatgcccggttcgcaaccttccatagaaacatgtcgtcacccagaccctgttgctgcagaacctgagctggatctaaattgggcagtgtcacctctctcttccagacatttcgatcccttaaagttgcttgacgtggaggttatttcggtcataaaaccaagaacatggagagtggaaacacttttgtgggactagtaaaacggcctgcaccataaaagagcagaggagtgaaaatcgatgtcatatgtaaactagaataacatgtcagtaacttttaaaaacatagctaacactcacttattcattcaagggagggcttctggctcatcagctattttaggtttctttacatttgctttgaaaagctttctgtggctctttatagctgttttacccaatcagttcctttttacttaggataatctcaagatgggctgcagtctgtgcagacacacaggctgagcagtgaaggggtgtgagctggggatgtgctgagctgcctagcagatccctgggacttagggtaagccttagagagcctcagttatttcgttgcacactggaaattgagagctgactgtatattgtatgccagcattttaagtatcgtaatctctcaatcattcatgctaatgaagggtagctagagataacaaagaaaagtgtaatcaccaaatcatttctttgcatcttcagccagagctgtgatctctttgggttccgccttgagtcctcatgtccattagcccagtctccagaataatacatagtaggtgttaaaaaaaaaaaaaaaaatcagctgggcgcggtggctcatgcctgtaagcccagcactttgggaggccgaggcaggtggatcacctgaggtcgggggttcgagacaagcctgaccaacatggagaaacctcgtctctacttaaaatacaaaattagctgggtgtggtggcgcatgcctgtaatcctagctactcaggaggctaaggcaggagaattgcttgaacctgggaggcagaggttgcagtgagccaagatcgcgccattgcactccagcctgggcaacaagagcaaaattctgtctcaaaaaaaaaaaaatcaatgctgtagttctaggaaatttagatgtggctgttgtcataaatggatcctttagaattgtgaagaccttctgattgcactttggaaatttttagttaaatttttggagcatgtctttggaatgtgccctgcaagtctcatgtgctgcaactggttgcatgtgattgcccttgaggttgcaagggccctaactcttctcccattttgcatgcagtgatctgatttgcaggaaactgttggagcaagaggcgtttcctctctatgcacagaccaattccagtaggacttccccctagaagtgctctttaaggaaactctccttgaatttctatcactttcaattaccttttcttttagaaatgttgggccccagttccccctcagccactctgaaagccattcactataaatatgaccaggcaaacaaaggaagaagccacaggtaaagaggagacaccagatggctaaaagatgctaagctcagtgattttctcacagcttataagccccttggcttggctttctttcagttttactgtgattattactttataattaaagtccatggctgggtgcggtggctcacgcctgtaatcccagcactttgggatgccaaggcgggcgtatcacctgaggtcgggagttcaagaccagcctgaccaacatgaagaaaccccgtctctactaaaaatacaaaattagctgggcgtggtggcgcatgcctgtaatcccagctactcgggaggctgaggcaggagaatcgtttgaacccaggagatggaggttgcagtgagcagagattgtgccactgcactccagcctgggcaacaagagtgcaactccatctcaaataaataaataaataaataaagtaaaataaataaataaagtaaaataaaaaataaagtccacttactatgtagaaggtgataacgtagagtggttcttcccatggaaaagcccacataatctctggctgcccctcagcgttgttcccgtgacttcagggtgaaagatgcctgccaccggagaagttacacaaagtggttattttgaatgcttatgacatttccattatcctttggaattccgtgaaattggagcacatttatttttccttagtctttctcctgtatcataatgaaaagcagtgaaaatcaggaggtggctctttgtcacaaataaaaactgcatgggtgctaaatgaattttagatcatcaacccaagcagggacaaattagattgaaattaggcaaaattaacatccatgaacacagcagtgaggaaataagtcttttcaattgagcaggttcaaagccttcaaggacgggaacttctaagagcctctgggagtggaaaatcaaaattctgtgctttagattatttctgccccctgctggctatgtggagtagaacaatgtattcagccacttgattaagaaagtctgctttttcaaagataatatccatttatcatagcaaaaacataacataccctgatacactaaaatttttctcagtctcaactttattgtgaaataaatgcctctttttatataaccttaatctcacttcttagctcatttaatagtcttccatgtttttaaaaattggtaagtttataggtacaatttttcttgatatatgctgaattttatatcttatccacatagtcataatgatttatatcctttgtaaaaactttccctttcagaaaattttaataattgttcccaggaaatcctcttaaggatttcattttgtgaaaaatacttctggtttgctcagatgttataaaacctaaagattaagctgggcacggtggctcatgcctataatcccagcactttgggaggctgaggtggacggatgacctgaggtcaggagttcgagaccagcctggccaacatggtgaaaccccatctctactaataacacaaaaattagccgggcgtggtggcagacgcctgtaatcccagctactcgggaggctgaggcaggagaatcgcttgaaccccggaggcggaagttgcagtgagccgagatctcgccgttgcactccagcctgggagacaagagcaaaactctgtctcaaaaaaaaaaaaaaagaaaaagaaaagtcctaaggattaatactgtgttatgaatattcattacatactcagtatttccaaagtggctatattgtttcctgctggttattccctccaatattatctaatgaagtttcaactgctaagtacatggcagtggacaagaaacaatgaaaaatgggtctctggggggccaaaacagatacagaaaatccgcgggcactaaattttgcattttgctccaggataagccttgggccttgactcagtctttaataagcccaggttcctcttttccctgttcccagcaagtaaaaatggcaaaggataccagggatagccagggtaacaataattaataataacagtaataaggctgggcacggtggctcaggtctgtaatcccagcactttgggagtctgaggcaggtggatcacgaggttaggagttcgagaccagcctggccaacatggtgaaaccctgtctctgctaaaagtacaaaaattagcagggcatggtggcacgtgcctgtagtcccagctattcaggaggctgaggcaggagaattacttgaacccaggaggtggaggttgcagtgagccaagatcacgccattgcactccggcctgtgcaacagagcaagactctatctcaaataaataaataaataaataaataataacagtaataatagagtttctgagcatgagagaagagatatcaagccataaagagcaaatagaccctgagaaggaactaaggaactgtatttttgcacagtgatatatcttcaacatattatgtctcaaatgtaggaagtatgtataatacattaaacacattagggaaagatttacattttttaaatactgtttttactttctcacttaaataagaacatttcaggtatttggaaaacctacattatccaacaatgattattaacagtggtatcactgtcttatttgttgaattccaagtcatgcttttttttcttttaaatagaatcctcactattaaatgatcctctcctttcattctctattctttttaagtttcctcaagaaatggttttattttcttggctttggaatgattagcagggtgtggtgaaattgttgatttacgtgtttttgaaactgaatttattaaaacacaatctctgaaccttcttaggatcgacacacagtcaggaaaccagaaacaacagcatctttgtggcccctcagaataaaaaagtatatgtattgattaagaagatagcatgttggcctgagtacagtggctcacgcctgtaatcccaacactttgggaggcttaggcaggcggatcacttgaggtgaggaattcaagaccagcctaggcaacatagcgagaccctgtctctacagaaaatacaaaaaaattaaaccaggcattatggcatgcacctgtggtttcagcctcacggggccctaatgcaggaggatcacttgagcccaggaggtcgagactgccgtgagtcatgatcgcaccactgcactccagcctgggtgatgcagtgagatcccgtctcagaaagaaaaaaaaaaaagaagatagtatgttgaaaaatcctgatgatttacctgtttaccctataaaggtatactttcatgatctaaagttgacaataatgacaataatatgtgtcatttcagggccattgattgttttaattaccttctctttatgaaaaatatgaccagttaattatagctccaaataccccacaccagacccacaacaacacagatgcacacgggtgcacacacatacacacacacaggcacatatttcccccgtctagttctgtattctactgttaagtccttattgagaatacttaaaatactcactgtgaagagtgctttggaaaatcttaaatggataatcataaagggatattgttttcagggtgtagcttccaatagaaaaaattgggggtttggtatttcaatgatactttgggtgtataatcgggagaggcccctttatgatagggttcccatagttcctgtaaaaacaagggtagtgatgaatctatttgcctctcttataaataactgctcgtttttctttctgtttttctccttgaagacatgacaatggatgaagtccgagaatttgaacgagccactcaggaagccaccaacaagaaaatcggcattttcccacctgcaatttctatctccagcatccccctgctgccttcttccgtccgcagtgcgccttctagtgctccatccacccctctctccacagacgcacccgaatttctgtccgttcccaaagatcggccccggaaaaagtctgccccagaaactctcacacttccagaccctgagaaaaaagccaccctgaatttacccggcatgcactcttcagataagccatgtcggcccaaatctgagtaactttatataaatatctcatggggttttatattttcatttgttgttgttgtttttttttaagaatcttctgatagagaaaaagactgctttgtcactcaaacatgttccttcgacctttcagtgtgcatgtgactcagtaacttcacatagaatatgattccctaagtatgctacacagcatcatattagatgtaagatgtaagacttgcaaaggacagaaggaatcttctgtaaccacatagctgtatgccagagaggaagccttgttattgggcatttgatgaggtttggcatggacttcaaggataaatgaatgaaaactttgcaccacttttgttacaaggtacggtagaaaatagtgaagtcagtttcctctcatcaaatctaaaattctccaaaatactctcaggcataacatacttagctgttaaattttgaactgctaattactaatacttgaataccaatagttactgagattcctattttgtggttagtctgactcaggatttggagcctaattaactctaaacttttgaaaattttaatcatcaagctatagaggctccaagtgcaattaataataactcatttataccttccacagaatttaataaagattctacttgtttctgtcttttaataactttccccttttgtgcccttgtggcctcagaaatccttaagaattgcatggatgaatgtgaccataactgattttggaatggttcagtttaggaaccaagaggcccaggtgaggcaacatcttttttctctacaggtaccaacaaaccttgacttgtcagcttccatcatcaattaagattctcagaatttgcaattaattgaatagaattcatttactatctgcccactcaaagaagtacaagggtagagtaagctaactgggctttaacatggtcagaatgtctggtgcatgaactataaaaaagagaactgtctcccatccccttccttgttttactcttagtaacatccagaattccctggaacagattgcctaccaccagaccttagaaaagactgtcattctcttgctccttacttgaaatacaaatattgggaatgtcacagacatcaagcaactactgtcaagtgggaggagagaatgagcagaattgctgactcctatttgtagagtgaaaaggaggagtgataatagatgcccttctgtctagctttcctttcttcaactagtggtaatgcaagattagaatcaaggttgacaggaggcaaggtcactcactgaagtgacagaaagacaattctcctttgctccaaagagagaaatctgtcacctttgcacctcactgcctttaaacacagacgggagggcaggccaaatctcagcattgacttttgtcctccaagagaggaagagaagaagtaattgggcaacttggaggcccgcgccccagctagccttcctgatcgtaacctccaacctcaggaaagggaccttcccaaaacacagatcccaaaggaaacaaaatagaccaaggagcataatctgcttctctcacacagcctctctgccagtggaccctgcctgcttccctctcagtgctcagcactctgtgtagtgtctttcaggttgatacactctcccaaggtgcaggcgctggccccatgagcccagcaccaaagttttctaagtcataggtcagactgtcaagatcatttctttatctataggttgatatttagcttaaaaaaaaagaataaacctagaactcaaaggaaacctgttgcaaatagcttagatcaacagtgtatctcttccctaagaatgatagtatcttagtaagacaccttctatgcatggtatggaagcatgatttttgcttgtgggaaaacctaatattttatcagacccctcggacttctcaatccctcgctctccacacagtagtacttaatgaaaatgttttgctttagagagcaaaatgctactttcagaagacactgaaatagtatatgtatttgcttaccatttgcaagctaaaatcaaggtgggatggggtcattattttcacatagaatgtatttattttgtgcaggctgttaaacacatctggcacctagtttttccattaagagcattgctattttccctttttataaagtagcttctgctgtcaaggttaacaattctatatgctttaggaagctaagttctaatttccttttgtgagtttcatttcttttataaccagtatgttaccacagacatcagttgcaaagctacgatgatagtgtgattcttagccgaaaaaaaagcgtgtgctcttaaagtatgttcagtttttctgtctacatatgctttgtgtgagttaaaaagggggtgggtggtgtagatattcctttagctgctttgcatatttaacccagtcatcaaaaggcataaatgacttcaatattttatatatcttggttttcaagtatcatttcacattctctatacatgactttgttattgtggaatacaagcctgcaatggatgtatatatacagaacattaataattcttagaaggatggaagccaaatggctgcatgatggaaattagaagaaaaaaaaagcagaaacttgaatttgctaagcatgtttggggggaaatagaatccttaactcagtgcctctgtctgcgatatggaaaccttcaactttgttcaccaaaattgtattatacctgtgtatatatatatatatatatataaatataaatatagtatagtgaatcagacaccatcagttttaagtctctggtagccaaacttaaataaataatccatagaatatcacatacgttcactccatcttcatctctgaagttagtggagaccatcaaaatgactgtacatttcataactctgggaagatttcaaatgtgaagtgcccctgtgcattttcttggccatagcacggcattcttgctttagctgtgctttcctgggatgagaagatcttggtgtatttaacacataagctttgttagaaatcacctctgaagatcatttcattttctcactttgggttgttgcaagacaaagcaaaggaaaaggaacacaatgaaggaggccgtgacatttttagttgccaccgttgtaactcaaacaatatgggtttgttggtgaactgatttatcaaggcttctgttatggttttgcatctgtgtgtgaggaaaattttaatttatttggaagtatttattagccatgttgttggtcctgaaaataaatctctaagtagcacagttgtgggtatattatgcagacacttaccacaatacctgcaaaagtaactgtggttttctttcaagacactgtaataaacagtgaactaagagaatagattctgatacatctcgataaatcattctctgcaaaagtttcagggctaatgtatttatgtgtatttttaaattctactttctttggcatctcttcatggctcagcgacaacaaagtaataggtcattggctggcttacgtcgataggaattttactcttaagaagggccagtgtatagctgactctacatataatgtgtaatcagataatccaatagagaggaattgtccaaatagttttagtacctttctgatcatctgactcagtaggctaggagacaatctgtcatctgagccatagttcttgagatttaaaaagtctgtccagtgactgcaatctgattatgaataaactattttaactattcattcttgctgaaactgaagtgtacacaatagcacactgttggcatgctgaggcaaaacattgggttcttttgtgttctaccttcaaaacaatctgtttgcatttgaaatataagtgtttaagctttttaggagttagtgtaataagagaatgtgaatatgttgggaaattttcagatgccattaataattgtaattttgttgttaaattaacaaggactttaggataagcctctcgatgtttttgctttaaattgaaagcatgtctgtcaaattgcaagtctcccttcagtttctatatatcacccaggagagggtctctgagttggtgttgtacctgtaccactcacatgtagctcaagtgtaatttgtagtgtttacattcaagctgggatcttgattggttaaattaatccacataccactgccactgctgaaggaccaggtgttggaatacacagcattacagactataagcaaagcaaacaaaagttgatccttacatatgccatccttctgtgtcattttgtggctgttctgtgtttttcttcctagttatttattattgttaataacttactttttcttacattctgttgtaaataaaatacaaagcaatcttctttgcaagcgtagcttcctctctctctctctctctcgctcgccctctctctctctctctctctcctctttagctattctcgagggaatgttagtaattgttcacctgtgggttgatgggcttgcttcttttcctctatggatttttttacccatccccataccactgccactgctgaaggaccaggtgttggaatacacagcattacagactataagcaaagcaaacaaaagttgatcctcacagatgccatccttctgtgtcattgtgtggccttgcctgctagtaggcatatggcaccttcaggacccttggtaggaaaagtctgagtgtctgcactaattatccagccaaaaattacacaaggtggccagccaggccaacatggcgaaacaccatctctactgaaaatacaaaaatttcccagccgtggtggcacacgcctgtagtcgcagctactcaggaggctgaggaatgagaatcacttgaaccctggaggtggaggcttcagtgagctaagatcacgccactgctgtccactctgggtgtgaaagagcaagagcctgtctcaaaaagacaaaacaaaacaaaaaaaccctggctgaggccgggcgcagtggctcacacctgtaatctcagcactttgggaagccgaggcgggcagatcacgaggtcaggagatcgagaccatcctggctaacacggtgaaaccccgtctctactaaaagtacaaaaaattagccgggcgcggtggcggtcgcctgtagtcctagctactcgggaggctgaggcaggagaatggcgtgaacccgggaggcggagcttgcagtgagccgaggtcacatcactgcactccagtgacagagcgagactccgtctcaaaaaaaaaaaaacccgaggtgaatctgtaacccagtgggatactcatgcatccgtccaccaggtgcttggttccctcgcctcgaatgtgaagctatccaccctgggggaatctgtaggaacaccatcccagtggtgttcctagattctctccactgaaggttgggccagtttttaaggtgagctgaaatcactctgatgtggtttctccatctcaggtagctcctgtacacaaaagggttctctgcagatgggtagtctgaggacagaaacttttatttctttggggttttttttcgagtctcactctgttacccaggctggagcgcagtggtgtgatcacagctcactgcagcctcgacctcctggactcaagtgatcctcctgcctcagcctccagagtagctgggactacaggtacacaccaccacaccaagctaattttttattttttctagagactggttaaactatgttacccaggctggtcttgaactcccggactcaagtgatcatctcgcctcagcctcccgaagtgctggataattataggtgtgagccaccgcacccagccagaattactttctagccccctgctcgttagtctcctgctaaaacagcatatacctctcactctgttctctcctcttgaatcatccacatcctatgttctaatctgtgactggatcaggcacacagcttcatagaatagcacaccatcagtcggctttctacaccgaaaattttcccaaaatcatattgcatcgttccaatgaacaaaaacatgcttgcttttgtagctccaacttcaccattaccacccccaacctgccttttacttcttttttcaaaacacacaaactttccacacattgttgttggctgactttcagccagtgaacttgggtacagccaggctgggtgtttattcccgggaccaaactatatgggtggttaaacatttggatgcctaatgttaaatatatatatatatatgtttgtatcacccccagcttcctactacagcttttcatcaaggcattatctcatttgagcattactctttagatttccaaacgcccacattcttttctaaaatgtccttgtttcggccgggcgcggtggctcacgcctgtaatcccagcactttgggaggccgaggcaggcagatcacgaggtcaggagatcaagatcatcctggccaacatggtaaaaccctgtctctactaaaatacaaaaaattagccaggcatggtgacgcggcactggtagtcccagctactcggggggctgagaggcaggagaatcacttgaacctgggaggcaaaggttgcggtgagcagagatcgcaccactgcattccagcctgggtgacaaagcaagactctgcctcaaaaaaaaaaaaaaaaaaaaagtccttgtttccttcattacattctacttggggtttcttgcctctgacctccagctgcatcttggcctctcaagttcaggaaaatcatgcgaccattctccaaccctgtcgtgaaatatccctgtatgaaaatatcaccctcagccgggttcagtggctcacatacctgtaataccaacgctttgggaagctgagacaggttctcttgagtccagaagtttgagaccagcctgggcaacatggtgaaatcccatgtcttaaaaaaaaaaaattaaaaaaaaaaaaagagaagaacaaaaatgtcaccctcagtcctgaagctttgacgcctttggaacaacaatctttgtgcatgttcacatacagttgtgtgtgtgtttaactcagtgcggttgatccaggcaaaccctgttttccagctgacagactgactttctgtgcctaatgtacctgccccctgacatttcatcctcccataaatcctcctttttccatagtatgcaacctagtaggatatcccactcaaatccaaatcttcaagtgcttccctgctcctgggaaagttggaagcaggctgggactttgccttaatgcttttgctctgttcccagcattgaggaatggagctagcctgtggccaaagaaacgacacagcctcagaaacctactgaatcagccattcagtgaagcaacattaacgggctgaattaagcacctgggatttaagggctaattatgtttaactgtaagtaccaactttccgcactgtaagcagacacaaaagacagggccatcatttcccctcctttagcttttgtagaagggagttttgaccgctttgtccctggagcgtatttgagggtggccaaatctggacttctgtgattttttaaaaaaaaatcattccaaaataactttcttgctcccaagagattccacaggcaagatgctggcagtttacagctcattagcaacccttgagaatcattttgtgctcttaagcataccagtgattatattcagagtgttcagagacagcttgctgctttctctgtgcagtcagtcaacagtactgaatgcatattttgtcttttctcagaatacaacttgaaaatttacaaagattctacaagtttaaattttcccactgtcatcttacagttaactgtatttctttgcattttgctaaaaatcttattatataaatccaagaatgtgacttttcaccttaagtactttagaatttttctgtagagcataatccgtacatgcctgtctttctacaaaatgctttgaggatattgaattgttttataaacacctttacatttggtacatagcatgtttatcatttttcatagctatataatattccattgggttgaaaatcagtaacttacttaaacattcctttattatttagcatttaggttatgttccagattttgttattatatacagtgccattaggaacatctttgcaacatagcttatgtcttctttttaattatttgttctggataaattcccagaaattgaattactgggtcaaaggatgtaagtattttcctgacttttgggtccttactgccaacatcccctccaaagaaaattataccaatttacaattccactgacaatatgtgagtgagaacatgtgtctctttaaacaagtatttgccattgtaaaagttcaccagtctcaacttattaagcaattgccagcatccaatttccatacaagtcttttgttaaagtattaataggtcaaatatccttattttgggtagtcatgtgatgaagggagagcccagacacaaagaagctctccgaattatttaaatgttcagtgccttctccagcctagctagcaaactgtagaaacatttgactggctactacagaaacaaaagcctaacttgagcataaggaactgcatttaattgaataaacaaacatcaattctaagtcattttgttttcacactttcagggataacaaacattgaatgcatctttttatttgaggttttcctgaaaaccaccatatacgtgccaacaagtttttgggtttttgcttttttttttttttttaccaagaaggaatcagttaaaaaaaaagaaagaaagaaagaaaaaagaaaagaaaaaaaaactccagctctcttactgttattttagaatcagtgattcccaaattctagcagaaccttggtaaggacaaagcagagtccctcctaagtctttgatttaacttctcgggaagcaacgtgatgacagatcacacatgtgctccaaaaaagagaagaaacagttggtacatagcacccttttcagccacgcgcaagccattcctgaggaatagagaattctccaccaggagagtactatgctcatttctcatacataacgaggaccaggtataaaatttacactcaagttagtttggaatctgactgcagtgtttactttttttttttttttttttttgagatggattctcgctctgtatccctggctggagtacagtgacatgatctcagcacatagtaacctccaactcccgagttcaagtgattctcctgcctcagcctctaagtagctgggattacaggtgcctgccaccacgcccagctaatttttgtattttttattagagacagggattcaccgtgttagccaggctggtctcgaactcctggcctcaagtgatccacctgcctcggcccccgcaaaatgctgggattacaggtgtgagccacctcacccggcccagtgtttactgttttattgtcagtgttgggtgtttattttaattattttgagataattatagattcacaggaagttacaaagaagtatacaggatggcctgtacacccttcacccggcctcccctaatgataacatcttgtataactagtagtacaccagccgggcctggtggctcatgcctgtaatctcagcactttgggaggccaaggcgggcagatcacttgaggtcaggagttcaagaccagactggccaacatggtgaaaaccctgtctttaccaaaaatacaaaaaaattagccaggcatggtggcaggtgcctgtaatcccagctacttgggaagctgaggcaagagaatcgcttgaatccaggaggtggaggttgcagtgagctgagattgcaccactgcactccaacctgggcgaaagagtgagactctgtctcaaaaaaaaaaaaaaccaatagtacatcacaaccagggagttgacattggtacaattcatagagcttatgaagatttcaccatgggcaggcacggtggctcactgctgtaatcctagcacttttggaggccaaggtaggcggatcacgagcccaggagttcaagaccagcctgggcaacatggtgaaaccccgtctctacaaaaagtacaaaaatattggctaggcgcggtagtgcgtgcctgtagtcacagctacgtgggaggctgaggtggcagaatcacttaagcctgggaggcagaggttgcagtgagctgagattacaccactgcactctagcctgggcaacagagcaagaccctgtctcaaaaaaaaaatttcaccaagttacatgcagtcatttgtgtgtgtgtgtgtttgtgtgtgtgtgtgtgtgtgtgtgtacgcatgtgtatgcatgtagttctatgcaatttcctcatcaatatagcctcatgcagctatcactacatttaagatacagaactgttccatcactacaagactctctcatgctgccatcccttaccccaatctcccaaaatctttactttcaaaaacgaaaaaattttcacagaggcaaacagccacctcaattttttttctgctactttctaacatattcatcacaactctcaaacattttggggggcatttaaatttaattttaaaattaaatttcaattaaatatttttattgtaaaatatacataacatacaatttatgtatatttaagtatacgcaatttgtgtatattatgtattataaatctctcatgagacttattcactatcatattagcgttttgagacagagtctccctctgttgcccaggctggcgtgcaatggcgcgatcttggctcactgcaacctctgcctccaggatgcaagcaattctcccgcctcagcctcccgagtagctgggattacaggcacacaccaccacgctcggctaatttttgtattttggtagagatggggtttcaccatgttggccaggatggtctcgaactcctgacctcaggtgatcaacccatcttggcctcccaaagtgctgggattacaggtgtgagccaccacacccggccgcatagtagccatttttaagtatataattcagtggcattaactacattcacaatgttgtgcagccatcaccattatctttttttttttctttttttgagacacagtctcactctgtcacccaggctggggtgcagtggcacaatcagctcactgcaacctccacctccagggttcaagcaattcttctgcctcagcctcccaagtagctgggattacagatgtgcaccaccatacccaactaattttctatagagacagggtttcgccatgttggccaggctggtctcaaactcctgacctcaagtgatcctcccaccccagcctcccaaagtgctgggattacaggtgtgtgccaccatacccagccaccactattcattttcagaactttttcatcatcttaaacagaaactctgtgcccattaagtaataagtccccatcctgccctcctcccagcccccaaaagcctctattctactttctgtctctgcaattttgcctattctgtacctcattgtattagtctgttctcacactgctaataaagacatacctgagactaggtaatttataaaggaaagaggtttaattgactcacggttacacatggctggggaggcctcacaatcatggtggaaggcaaagaggagaaaggcacatcttacatgatggcaggcaagagagcggtgcaggggaactcccccttataaaaccattagctctcctgagacttattcactattatgagcacagcacgggaataacccacccccatgattcgattacctcccaccaggtccttcccacaacacgtgggaattatggaagctacaattcaagatgagatttgggtggggacacagccaaaccatatcactcatgtaagtggaatcctgtaatatgtgtccttttgtgtctgtcttacttcacttagcataatgttttcaaggttcatccatgttatagcatgcatcaaacattttaaagtcttattttatgggaagagggaaatcctataagccagtaaacatactgtacagtttgcttatcttaatctatttagtgttgctataaaggactactggagactgggtaatttataaacccacggtttataagctcacggttctgcaggctgtacaaaaagcatggcaccagcatctgcttctggtgaggcctcaggctgcttccactcacggtggaaagtgaagaggagccagcctgtgcaggtcacatggtgagagaggaagcaaaagaagtgggagactatggactcttcaacaaccagctctggaaggaagtaatggaaggagaactcacttgtgatcacaaggatagcgccaagccagaattcatgtgggatccacccccatgacccaaatacctcccattaggccccattgccaacacaggggatcaaatttcaacatgaagtcctggtgtggtggctcacccctgtaatcccagcactttgggagggcttggcgggcagatcacttgaggtcaggagttcaagaccagcctggccaacatggtgaaaccctgtctctactaaaaatacaaaaattaaccaggtgcagcagcatatgcctataatcccagctactcgggaggctgaggcaggagaatcgattgaacttgggaggcagaggttgcagtgagctgagattgcgccattgcactccagcctaggcaacagagcaagactccatctcaaaaaaaaaaaaaaaaattcaacatgagatttggaaggaacaaacaaaccaaactataggagtgcagcactagtaagcagaagttctctaattattagaaaacagatatttccttgtttttattttttttcttttgagacagggtctcgctctgtcacccaggctggagtgcagtggcacaaacatagctcactgtgacctcaccctcctgggctcaagctattctaccacgtcagcctcctgaatagctgggaccacaagcaagggccaccacacctggctaatttttttaatttttgtagagactgggtgtcaccatattgcctaggctggtctcgaattcctaggctcaagtgatcctcccaccttggcttctcaaagtgctgatattataggcatgagccagcatacccaaccagaccttttctagttattagacaacagacatttttctaatgctgtgtgatgctggacaagtgacttcatccctctgagcctttgtttcttcaactgtagcaacactaccattaataacaggtggcatatattaaatctgaatgacaaatatgtaaaaataagattgtcagtaggtgatggaagctgcggctgaaaaatcctgagaaaaatagaatgcacaggcaaatttcaacagtagctctaggccgagtgcagtggctcatgcctgtaatcccagcactttggggagccaaggcaggaggattacttgagctcaggagtttgagagcagcctgggcaacatagtgagacctcatctctacaaaaagtttaaaaattagccaaacatggtggcatgcgcctgtagtcgcagctactcaggaggctaaggtaagaagatcgcttgagcccaggagttcaaagctgcagtgtactatgattgcaccactgcactctagcctgggacacacagcaagaccttgtctctaaaaaataaataaataaacagaagctctatgagaaagagcaggtgacctttcctagtgctccatcagtacatgaagctcctttttaaaataagaataggctgggcgcggtggctcacgcttgtaatcccagcactttgaaggccaagatgggcagatcacgaggtcaggagttcaagaccagcctggtcatcatggcgaaaccccgtctctactaaaaatacaaaaattagccaggtgtggtggcaggtgcctgtaatcccagctacttgggaagctgagtcaggagaatcgcttgagcctgggaggcagaggttgcagtgagctgagatcatgccactgcactccagcataggcaacagagcaagactccgtctcaaaaaaatataaataaataaaaaatttaaaaaaaaacaaaaatagtccaggcacgatggctcacgtctgtagttctagcactttgggatgctgaggcaggcagatcacctgagtccgggagttcgagaccaggccaacatggtgaaacccatctctactaaaaaatacaaacattagctgggtgtggtggc

SEQ ID NO: 1469 - DNA, 6154 bp, Homo sapiens
gctaccctccccgccgcggccgctgctgatgtcagcctcgctcgcgctcgctcctcccgcacccacctcccggccccaggcacactgcatcggcgcggacgctccggccccggcgaggtggctgcaaactcgcgggcacgcacggcgcccggggagccgagggactcgggggaggggacgcgcgcggaaggcgccagcttcctcccgcccgcccctggcagccgcgagccgaggttggaggcgcccggggccccagccgggcagagccgagcggcggcggcggcggcggcttcccttttctccccgagccgagccccggagcggcgcggggaccggccctaaaaagagcaggaaatcttgtttaccgcccgcggagagaagccgatcgagcctttgtctggaaagtcagcatctccggctccggctgcaatgtgttcctggtgacattagcatcgggcagacccgccggaggaggggggtcgccaggttcccgtctgctttcggaggcggatcgagcgggtgacttttgtgcattcgttttaatttttggaaatctctcttttttcctccctcgctcgctgccgggcatgtcctgatctggcggccgctcctaccaccctgggcagccgagcagagtcgtccccagcgggtctccctccctgcctccctgactttgcaacaccgcgttccgggaggaccggcctcggcgagggaggaggcgggggagctgcgaacacccagacccaaaccctgacatgctctggggcggagaggaggaagccaggagctgagcgcgccgcgggggctgcttcgccctccggctccgagcgccgggctccgggcgccctgccctgcgcctgggcagcagccttgctggtcttgggggcgccccccgcttcccgccccgggggtccgcggccggcaggaccatgctgctgaaagagtaccggatctgcatgccgctcaccgtagacgagtacaaaattggacagctgtacatgatcagcaaacacagccatgaacagagtgaccggggagaaggggtggaggtcgtccagaatgagccctttgaggaccctcaccatggcaatgggcagttcaccgagaagcgggtgtatctcaacagcaaactgcctagttgggctagagctgttgtccccaaaatattttatgtgacagagaaggcttggaactattatccctacacaattacaggtaagtccttatgttcctttctgccgaaattctccattcatatagaaaccaagtatgaggacaacaaaggaagcaatgacaccattttcgacaatgaagccaaagacgtggagagagaagtttgctttattgatattgcctgcgatgaaattccagagcgctactacaaagaatctgaggatcctaagcacttcaagtcagagaagacaggacggggacagttgagggaaggctggagagatagtcatcagcctatcatgtgctcctacaagctggtgactgtgaagtttgaggtctgggggcttcagaccagagtggaacaatttgtacacaaggtggtccgagacattctgctgattggacatagacaggcttttgcatgggttgatgagtggtatgacatgacaatggatgaagtccgagaatttgaacgagccactcaggaagccaccaacaagaaaatcggcattttcccacctgcaatttctatctccagcatccccctgctgccttcttccgtccgcagtgcgccttctagtgctccatccacccctctctccacagacgcacccgaatttctgtccgttcccaaagatcggccccggaaaaagtctgccccagaaactctcacacttccagaccctgagaaaaaagccaccctgaatttacccggcatgcactcttcagataagccatgtcggcccaaatctgagtaactttatataaatatctcatggggttttatattttcatttgttgttgttgtttttttttaagaatcttctgatagagaaaaagactgctttgtcactcaaacatgttccttcgacctttcagtgtgcatgtgactcagtaacttcacatagaatatgattccctaagtatgctacacagcatcatattagatgtaagatgtaagacttgcaaaggacagaaggaatcttctgtaaccacatagctgtatgccagagaggaagccttgttattgggcatttgatgaggtttggcatggacttcaaggataaatgaatgaaaactttgcaccacttttgttacaaggtacggtagaaaatagtgaagtcagtttcctctcatcaaatctaaaattctccaaaatactctcaggcataacatacttagctgttaaattttgaactgctaattactaatacttgaataccaatagttactgagattcctattttgtggttagtctgactcaggatttggagcctaattaactctaaacttttgaaaattttaatcatcaagctatagaggctccaagtgcaattaataataactcatttataccttccacagaatttaataaagattctacttgtttctgtcttttaataactttccccttttgtgcccttgtggcctcagaaatccttaagaattgcatggatgaatgtgaccataactgattttggaatggttcagtttaggaaccaagaggcccaggtgaggcaacatcttttttctctacaggtaccaacaaaccttgacttgtcagcttccatcatcaattaagattctcagaatttgcaattaattgaatagaattcatttactatctgcccactcaaagaagtacaagggtagagtaagctaactgggctttaacatggtcagaatgtctggtgcatgaactataaaaaagagaactgtctcccatccccttccttgttttactcttagtaacatccagaattccctggaacagattgcctaccaccagaccttagaaaagactgtcattctcttgctccttacttgaaatacaaatattgggaatgtcacagacatcaagcaactactgtcaagtgggaggagagaatgagcagaattgctgactcctatttgtagagtgaaaaggaggagtgataatagatgcccttctgtctagctttcctttcttcaactagtggtaatgcaagattagaatcaaggttgacaggaggcaaggtcactcactgaagtgacagaaagacaattctcctttgctccaaagagagaaatctgtcacctttgcacctcactgcctttaaacacagacgggagggcaggccaaatctcagcattgacttttgtcctccaagagaggaagagaagaagtaattgggcaacttggaggcccgcgccccagctagccttcctgatcgtaacctccaacctcaggaaagggaccttcccaaaacacagatcccaaaggaaacaaaatagaccaaggagcataatctgcttctctcacacagcctctctgccagtggaccctgcctgcttccctctcagtgctcagcactctgtgtagtgtctttcaggttgatacactctcccaaggtgcaggcgctggccccatgagcccagcaccaaagttttctaagtcataggtcagactgtcaagatcatttctttatctataggttgatatttagcttaaaaaaaaagaataaacctagaactcaaaggaaacctgttgcaaatagcttagatcaacagtgtatctcttccctaagaatgatagtatcttagtaagacaccttctatgcatggtatggaagcatgatttttgcttgtgggaaaacctaatattttatcagacccctcggacttctcaatccctcgctctccacacagtagtacttaatgaaaatgttttgctttagagagcaaaatgctactttcagaagacactgaaatagtatatgtatttgcttaccatttgcaagctaaaatcaaggtgggatggggtcattattttcacatagaatgtatttattttgtgcaggctgttaaacacatctggcacctagtttttccattaagagcattgctattttccctttttataaagtagcttctgctgtcaaggttaacaattctatatgctttaggaagctaagttctaatttccttttgtgagtttcatttcttttataaccagtatgttaccacagacatcagttgcaaagctacgatgatagtgtgattcttagccgaaaaaaaagcgtgtgctcttaaagtatgttcagtttttctgtctacatatgctttgtgtgagttaaaaagggggtgggtggtgtagatattcctttagctgctttgcatatttaacccagtcatcaaaaggcataaatgacttcaatattttatatatcttggttttcaagtatcatttcacattctctatacatgactttgttattgtggaatacaagcctgcaatggatgtatatatacagaacattaataattcttagaaggatggaagccaaatggctgcatgatggaaattagaagaaaaaaaaagcagaaacttgaatttgctaagcatgtttggggggaaatagaatccttaactcagtgcctctgtctgcgatatggaaaccttcaactttgttcaccaaaattgtattatacctgtgtatatatatatatatatatataaatataaatatagtatagtgaatcagacaccatcagttttaagtctctggtagccaaacttaaataaataatccatagaatatcacatacgttcactccatcttcatctctgaagttagtggagaccatcaaaatgactgtacatttcataactctgggaagatttcaaatgtgaagtgcccctgtgcattttcttggccatagcacggcattcttgctttagctgtgctttcctgggatgagaagatcttggtgtatttaacacataagctttgttagaaatcacctctgaagatcatttcattttctcactttgggttgttgcaagacaaagcaaaggaaaaggaacacaatgaaggaggccgtgacatttttagttgccaccgttgtaactcaaacaatatgggtttgttggtgaactgatttatcaaggcttctgttatggttttgcatctgtgtgtgaggaaaattttaatttatttggaagtatttattagccatgttgttggtcctgaaaataaatctctaagtagcacagttgtgggtatattatgcagacacttaccacaatacctgcaaaagtaactgtggttttctttcaagacactgtaataaacagtgaactaagagaatagattctgatacatctcgataaatcattctctgcaaaagtttcagggctaatgtatttatgtgtatttttaaattctactttctttggcatctcttcatggctcagcgacaacaaagtaataggtcattggctggcttacgtcgataggaattttactcttaagaagggccagtgtatagctgactctacatataatgtgtaatcagataatccaatagagaggaattgtccaaatagttttagtacctttctgatcatctgactcagtaggctaggagacaatctgtcatctgagccatagttcttgagatttaaaaagtctgtccagtgactgcaatctgattatgaataaactattttaactattcattcttgctgaaactgaagtgtacacaatagcacactgttggcatgctgaggcaaaacattgggttcttttgtgttctaccttcaaaacaatctgtttgcatttgaaatataagtgtttaagctttttaggagttagtgtaataagagaatgtgaatatgttgggaaattttcagatgccattaataattgtaattttgttgttaaattaacaaggactttaggataagcctctcgatgtttttgctttaaattgaaagcatgtctgtcaaattgcaagtctcccttcagtttctatatatcacccaggagagggtctctgagttggtgttgtacctgtaccactcacatgtagctcaagtgtaatttgtagtgtttacattcaagctgggatcttgattggttaaattaatccacataccactgccactgctgaaggaccaggtgttggaatacacagcattacagactataagcaaagc

SEQ ID NO: 1470 - protein, 333 aa, Homo sapiens [sequence omitted]

SEQ ID NO: 1471 - DNA, 6147 bp, Homo sapiens
gctaccctccccgccgcggccgctgctgatgtcagcctcgctcgcgctcgctcctcccgcacccacctcccggccccaggcacactgcatcggcgcggacgctccggccccggcgaggtggctgcaaactcgcgggcacgcacggcgcccggggagccgagggactcgggggaggggacgcgcgcggaaggcgccagcttcctcccgcccgcccctggcagccgcgagccgaggttggaggcgcccggggccccagccgggcagagccgagcggcggcggcggcggcggcttcccttttctccccgagccgagccccggagcggcgcggggaccggccctaaaaagagcaggaaatcttgtttaccgcccgcggagagaagccgatcgagcctttgtctggaaagtcagcatctccggctccggctgcaatgtgttcctggtgacattagcatcgggcagacccgccggaggaggggggtcgccaggttcccgtctgctttcggaggcggatcgagcgggtgacttttgtgcattcgttttaatttttggaaatctctcttttttcctccctcgctcgctgccgggcatgtcctgatctggcggccgctcctaccaccctgggcagccgagcagagtcgtccccagcgggtctccctccctgcctccctgactttgcaacaccgcgttccgggaggaccggcctcggcgagggaggaggcgggggagctgcgaacacccagacccaaaccctgacatgctctggggcggagaggaggaagccaggagctgagcgcgccgcgggggctgcttcgccctccggctccgagcgccgggctccgggcgccctgccctgcgcctgggcagcagccttgctggtcttgggggcgccccccgcttcccgccccgggggtccgcggccggcaggaccatgctgctgaaagagtaccggatctgcatgccgctcaccgtagacgagtacaaaattggacagctgtacatgatcagcaaacacagccatgaacagagtgaccggggagaaggggtggaggtcgtccagaatgagccctttgaggaccctcaccatggcaatgggcagttcaccgagaagcgggtgtatctcaacagcaaactgcctagttgggctagagctgttgtccccaaaatattttatgtgacagagaaggcttggaactattatccctacacaattacaggtaatgttcctttctgccgaaattctccattcatatagaaaccaagtatgaggacaacaaaggaagcaatgacaccattttcgacaatgaagccaaagacgtggagagagaagtttgctttattgatattgcctgcgatgaaattccagagcgctactacaaagaatctgaggatcctaagcacttcaagtcagagaagacaggacggggacagttgagggaaggctggagagatagtcatcagcctatcatgtgctcctacaagctggtgactgtgaagtttgaggtctgggggcttcagaccagagtggaacaatttgtacacaaggtggtccgagacattctgctgattggacatagacaggcttttgcatgggttgatgagtggtatgacatgacaatggatgaagtccgagaatttgaacgagccactcaggaagccaccaacaagaaaatcggcattttcccacctgcaatttctatctccagcatccccctgctgccttcttccgtccgcagtgcgccttctagtgctccatccacccctctctccacagacgcacccgaatttctgtccgttcccaaagatcggccccggaaaaagtctgccccagaaactctcacacttccagaccctgagaaaaaagccaccctgaatttacccggcatgcactcttcagataagccatgtcggcccaaatctgagtaactttatataaatatctcatggggttttatattttcatttgttgttgttgtttttttttaagaatcttctgatagagaaaaagactgctttgtcactcaaacatgttccttcgacctttcagtgtgcatgtgactcagtaacttcacatagaatatgattccctaagtatgctacacagcatcatattagatgtaagatgtaagacttgcaaaggacagaaggaatcttctgtaaccacatagctgtatgccagagaggaagccttgttattgggcatttgatgaggtttggcatggacttcaaggataaatgaatgaaaactttgcaccacttttgttacaaggtacggtagaaaatagtgaagtcagtttcctctcatcaaatctaaaattctccaaaatactctcaggcataacatacttagctgttaaattttgaactgctaattactaatacttgaataccaatagttactgagattcctattttgtggttagtctgactcaggatttggagcctaattaactctaaacttttgaaaattttaatcatcaagctatagaggctccaagtgcaattaataataactcatttataccttccacagaatttaataaagattctacttgtttctgtcttttaataactttccccttttgtgcccttgtggcctcagaaatccttaagaattgcatggatgaatgtgaccataactgattttggaatggttcagtttaggaaccaagaggcccaggtgaggcaacatcttttttctctacaggtaccaacaaaccttgacttgtcagcttccatcatcaattaagattctcagaatttgcaattaattgaatagaattcatttactatctgcccactcaaagaagtacaagggtagagtaagctaactgggctttaacatggtcagaatgtctggtgcatgaactataaaaaagagaactgtctcccatccccttccttgttttactcttagtaacatccagaattccctggaacagattgcctaccaccagaccttagaaaagactgtcattctcttgctccttacttgaaatacaaatattgggaatgtcacagacatcaagcaactactgtcaagtgggaggagagaatgagcagaattgctgactcctatttgtagagtgaaaaggaggagtgataatagatgcccttctgtctagctttcctttcttcaactagtggtaatgcaagattagaatcaaggttgacaggaggcaaggtcactcactgaagtgacagaaagacaattctcctttgctccaaagagagaaatctgtcacctttgcacctcactgcctttaaacacagacgggagggcaggccaaatctcagcattgacttttgtcctccaagagaggaagagaagaagtaattgggcaacttggaggcccgcgccccagctagccttcctgatcgtaacctccaacctcaggaaagggaccttcccaaaacacagatcccaaaggaaacaaaatagaccaaggagcataatctgcttctctcacacagcctctctgccagtggaccctgcctgcttccctctcagtgctcagcactctgtgtagtgtctttcaggttgatacactctcccaaggtgcaggcgctggccccatgagcccagcaccaaagttttctaagtcataggtcagactgtcaagatcatttctttatctataggttgatatttagcttaaaaaaaaagaataaacctagaactcaaaggaaacctgttgcaaatagcttagatcaacagtgtatctcttccctaagaatgatagtatcttagtaagacaccttctatgcatggtatggaagcatgatttttgcttgtgggaaaacctaatattttatcagacccctcggacttctcaatccctcgctctccacacagtagtacttaatgaaaatgttttgctttagagagcaaaatgctactttcagaagacactgaaatagtatatgtatttgcttaccatttgcaagctaaaatcaaggtgggatggggtcattattttcacatagaatgtatttattttgtgcaggctgttaaacacatctggcacctagtttttccattaagagcattgctattttccctttttataaagtagcttctgctgtcaaggttaacaattctatatgctttaggaagctaagttctaatttccttttgtgagtttcatttcttttataaccagtatgttaccacagacatcagttgcaaagctacgatgatagtgtgattcttagccgaaaaaaaagcgtgtgctcttaaagtatgttcagtttttctgtctacatatgctttgtgtgagttaaaaagggggtgggtggtgtagatattcctttagctgctttgcatatttaacccagtcatcaaaaggcataaatgacttcaatattttatatatcttggttttcaagtatcatttcacattctctatacatgactttgttattgtggaatacaagcctgcaatggatgtatatatacagaacattaataattcttagaaggatggaagccaaatggctgcatgatggaaattagaagaaaaaaaaagcagaaacttgaatttgctaagcatgtttggggggaaatagaatccttaactcagtgcctctgtctgcgatatggaaaccttcaactttgttcaccaaaattgtattatacctgtgtatatatatatatatatatataaatataaatatagtatagtgaatcagacaccatcagttttaagtctctggtagccaaacttaaataaataatccatagaatatcacatacgttcactccatcttcatctctgaagttagtggagaccatcaaaatgactgtacatttcataactctgggaagatttcaaatgtgaagtgcccctgtgcattttcttggccatagcacggcattcttgctttagctgtgctttcctgggatgagaagatcttggtgtatttaacacataagctttgttagaaatcacctctgaagatcatttcattttctcactttgggttgttgcaagacaaagcaaaggaaaaggaacacaatgaaggaggccgtgacatttttagttgccaccgttgtaactcaaacaatatgggtttgttggtgaactgatttatcaaggcttctgttatggttttgcatctgtgtgtgaggaaaattttaatttatttggaagtatttattagccatgttgttggtcctgaaaataaatctctaagtagcacagttgtgggtatattatgcagacacttaccacaatacctgcaaaagtaactgtggttttctttcaagacactgtaataaacagtgaactaagagaatagattctgatacatctcgataaatcattctctgcaaaagtttcagggctaatgtatttatgtgtatttttaaattctactttctttggcatctcttcatggctcagcgacaacaaagtaataggtcattggctggcttacgtcgataggaattttactcttaagaagggccagtgtatagctgactctacatataatgtgtaatcagataatccaatagagaggaattgtccaaatagttttagtacctttctgatcatctgactcagtaggctaggagacaatctgtcatctgagccatagttcttgagatttaaaaagtctgtccagtgactgcaatctgattatgaataaactattttaactattcattcttgctgaaactgaagtgtacacaatagcacactgttggcatgctgaggcaaaacattgggttcttttgtgttctaccttcaaaacaatctgtttgcatttgaaatataagtgtttaagctttttaggagttagtgtaataagagaatgtgaatatgttgggaaattttcagatgccattaataattgtaattttgttgttaaattaacaaggactttaggataagcctctcgatgtttttgctttaaattgaaagcatgtctgtcaaattgcaagtctcccttcagtttctatatatcacccaggagagggtctctgagttggtgttgtacctgtaccactcacatgtagctcaagtgtaatttgtagtgtttacattcaagctgggatcttgattggttaaattaatccacataccactgccactgctgaaggaccaggtgttggaatacacagcattacagactataagcaaagc

SEQ ID NO: 1472 - protein, 152 aa, Homo sapiens
MCSYKLVTVKFEVWGLQTRVEQFVHKVVRDILLIGHRQAFAWVDEWYDMTMDEVREFERATQEATNKKIGIFPPAISISSIPLLPSSVRSAPSSAPSTPLSTDAPEFLSVPKDRPRKKSAPETLTLPDPEKKATLNLPGMHSSDKPCRPKSE

SEQ ID NO: 1473 - DNA, 6273 bp, Homo sapiens
gctaccctccccgccgcggccgctgctgatgtcagcctcgctcgcgctcgctcctcccgcacccacctcccggccccaggcacactgcatcggcgcggacgctccggccccggcgaggtggctgcaaactcgcgggcacgcacggcgcccggggagccgagggactcgggggaggggacgcgcgcggaaggcgccagcttcctcccgcccgcccctggcagccgcgagccgaggttggaggcgcccggggccccagccgggcagagccgagcggcggcggcggcggcggcttcccttttctccccgagccgagccccggagcggcgcggggaccggccctaaaaagagcaggaaatcttgtttaccgcccgcggagagaagccgatcgagcctttgtctggaaagtcagcatctccggctccggctgcaatgtgttcctggtgacattagcatcgggcagacccgccggaggaggggggtcgccaggttcccgtctgctttcggaggcggatcgagcgggtgacttttgtgcattcgttttaatttttggaaatctctcttttttcctccctcgctcgctgccgggcatgtcctgatctggcggccgctcctaccaccctgggcagccgagcagagtcgtccccagcgggtctccctccctgcctccctgactttgcaacaccgcgttccgggaggaccggcctcggcgagggaggaggcgggggagctgcgaacacccagacccaaaccctgacatgctctggggcggagaggaggaagccaggagctgagcgcgccgcgggggctgcttcgccctccggctccgagcgccgggctccgggcgccctgccctgcgcctgggcagcagccttgctggtcttgggggcgccccccgcttcccgccccgggggtccgcggccggcaggaccatgctgctgaaagagtaccggatctgcatgccgctcaccgtagacgagtacaaaattggacagctgtacatgatcagcaaacacagccatgaacagagtgaccggggagaaggggtggaggtcgtccagaatgagccctttgaggaccctcaccatggcaatgggcagttcaccgagaagcgggtgtatctcaacagcaaactgcctagttgggctagagctgttgtccccaaaatattttatgtgacagagaaggcttggaactattatccctacacaattacaggtaagtccttatgttcctttctgccgaaattctccattcatatagaaaccaagtatgaggacaacaaaggaagcaatgacaccattttcgacaatgaagccaaagacgtggagagagaagtttgctttattgatattgcctgcgatgaaattccagagcgctactacaaagaatctgaggatcctaagcacttcaagtcagagaagacaggacggggacagttgagggaaggctggagagatagtcatcagcctatcatgtgctcctacaagctggtgactgtgaagtttgaggtctgggggcttcagaccagagtggaacaatttgtacacaaggtggtccgagacattctgctgattggacatagacaggcttttgcatgggttgatgagtggtatgatatgacaatggatgatgttcgggaatacgagaaaaacatgcatgaacaaaccaacataaaagtttgcaatcagcattcctcccctgtggatgacatagagagtcatgcccaaacaagtacatgacaatggatgaagtccgagaatttgaacgagccactcaggaagccaccaacaagaaaatcggcattttcccacctgcaatttctatctccagcatccccctgctgccttcttccgtccgcagtgcgccttctagtgctccatccacccctctctccacagacgcacccgaatttctgtccgttcccaaagatcggccccggaaaaagtctgccccagaaactctcacacttccagaccctgagaaaaaagccaccctgaatttacccggcatgcactcttcagataagccatgtcggcccaaatctgagtaactttatataaatatctcatggggttttatattttcatttgttgttgttgtttttttttaagaatcttctgatagagaaaaagactgctttgtcactcaaacatgttccttcgacctttcagtgtgcatgtgactcagtaacttcacatagaatatgattccctaagtatgctacacagcatcatattagatgtaagatgtaagacttgcaaaggacagaaggaatcttctgtaaccacatagctgtatgccagagaggaagccttgttattgggcatttgatgaggtttggcatggacttcaaggataaatgaatgaaaactttgcaccacttttgttacaaggtacggtagaaaatagtgaagtcagtttcctctcatcaaatctaaaattctccaaaatactctcaggcataacatacttagctgttaaattttgaactgctaattactaatacttgaataccaatagttactgagattcctattttgtggttagtctgactcaggatttggagcctaattaactctaaacttttgaaaattttaatcatcaagctatagaggctccaagtgcaattaataataactcatttataccttccacagaatttaataaagattctacttgtttctgtcttttaataactttccccttttgtgcccttgtggcctcagaaatccttaagaattgcatggatgaatgtgaccataactgattttggaatggttcagtttaggaaccaagaggcccaggtgaggcaacatcttttttctctacaggtaccaacaaaccttgacttgtcagcttccatcatcaattaagattctcagaatttgcaattaattgaatagaattcatttactatctgcccactcaaagaagtacaagggtagagtaagctaactgggctttaacatggtcagaatgtctggtgcatgaactataaaaaagagaactgtctcccatccccttccttgttttactcttagtaacatccagaattccctggaacagattgcctaccaccagaccttagaaaagactgtcattctcttgctccttacttgaaatacaaatattgggaatgtcacagacatcaagcaactactgtcaagtgggaggagagaatgagcagaattgctgactcctatttgtagagtgaaaaggaggagtgataatagatgcccttctgtctagctttcctttcttcaactagtggtaatgcaagattagaatcaaggttgacaggaggcaaggtcactcactgaagtgacagaaagacaattctcctttgctccaaagagagaaatctgtcacctttgcacctcactgcctttaaacacagacgggagggcaggccaaatctcagcattgacttttgtcctccaagagaggaagagaagaagtaattgggcaacttggaggcccgcgccccagctagccttcctgatcgtaacctccaacctcaggaaagggaccttcccaaaacacagatcccaaaggaaacaaaatagaccaaggagcataatctgcttctctcacacagcctctctgccagtggaccctgcctgcttccctctcagtgctcagcactctgtgtagtgtctttcaggttgatacactctcccaaggtgcaggcgctggccccatgagcccagcaccaaagttttctaagtcataggtcagactgtcaagatcatttctttatctataggttgatatttagcttaaaaaaaaagaataaacctagaactcaaaggaaacctgttgcaaatagcttagatcaacagtgtatctcttccctaagaatgatagtatcttagtaagacaccttctatgcatggtatggaagcatgatttttgcttgtgggaaaacctaatattttatcagacccctcggacttctcaatccctcgctctccacacagtagtacttaatgaaaatgttttgctttagagagcaaaatgctactttcagaagacactgaaatagtatatgtatttgcttaccatttgcaagctaaaatcaaggtgggatggggtcattattttcacatagaatgtatttattttgtgcaggctgttaaacacatctggcacctagtttttccattaagagcattgctattttccctttttataaagtagcttctgctgtcaaggttaacaattctatatgctttaggaagctaagttctaatttccttttgtgagtttcatttcttttataaccagtatgttaccacagacatcagttgcaaagctacgatgatagtgtgattcttagccgaaaaaaaagcgtgtgctcttaaagtatgttcagtttttctgtctacatatgctttgtgtgagttaaaaagggggtgggtggtgtagatattcctttagctgctttgcatatttaacccagtcatcaaaaggcataaatgacttcaatattttatatatcttggttttcaagtatcatttcacattctctatacatgactttgttattgtggaatacaagcctgcaatggatgtatatatacagaacattaataattcttagaaggatggaagccaaatggctgcatgatggaaattagaagaaaaaaaaagcagaaacttgaatttgctaagcatgtttggggggaaatagaatccttaactcagtgcctctgtctgcgatatggaaaccttcaactttgttcaccaaaattgtattatacctgtgtatatatatatatatatatataaatataaatatagtatagtgaatcagacaccatcagttttaagtctctggtagccaaacttaaataaataatccatagaatatcacatacgttcactccatcttcatctctgaagttagtggagaccatcaaaatgactgtacatttcataactctgggaagatttcaaatgtgaagtgcccctgtgcattttcttggccatagcacggcattcttgctttagctgtgctttcctgggatgagaagatcttggtgtatttaacacataagctttgttagaaatcacctctgaagatcatttcattttctcactttgggttgttgcaagacaaagcaaaggaaaaggaacacaatgaaggaggccgtgacatttttagttgccaccgttgtaactcaaacaatatgggtttgttggtgaactgatttatcaaggcttctgttatggttttgcatctgtgtgtgaggaaaattttaatttatttggaagtatttattagccatgttgttggtcctgaaaataaatctctaagtagcacagttgtgggtatattatgcagacacttaccacaatacctgcaaaagtaactgtggttttctttcaagacactgtaataaacagtgaactaagagaatagattctgatacatctcgataaatcattctctgcaaaagtttcagggctaatgtatttatgtgtatttttaaattctactttctttggcatctcttcatggctcagcgacaacaaagtaataggtcattggctggcttacgtcgataggaattttactcttaagaagggccagtgtatagctgactctacatataatgtgtaatcagataatccaatagagaggaattgtccaaatagttttagtacctttctgatcatctgactcagtaggctaggagacaatctgtcatctgagccatagttcttgagatttaaaaagtctgtccagtgactgcaatctgattatgaataaactattttaactattcattcttgctgaaactgaagtgtacacaatagcacactgttggcatgctgaggcaaaacattgggttcttttgtgttctaccttcaaaacaatctgtttgcatttgaaatataagtgtttaagctttttaggagttagtgtaataagagaatgtgaatatgttgggaaattttcagatgccattaataattgtaattttgttgttaaattaacaaggactttaggataagcctctcgatgtttttgctttaaattgaaagcatgtctgtcaaattgcaagtctcccttcagtttctatatatcacccaggagagggtctctgagttggtgttgtacctgtaccactcacatgtagctcaagtgtaatttgtagtgtttacattcaagctgggatcttgattggttaaattaatccacataccactgccactgctgaaggaccaggtgttggaatacacagcattacagactataagcaaagc

SEQ ID NO: 1474 - protein, 269 aa, Homo sapiens [sequence omitted]

SEQ ID NO: 1475 - DNA, 5170 bp, Homo sapiens
tacaaaattggacagctgtacatgatcagcaaacacagccatgaacagagtgaccggggagaaggggtggaggtcgtccagaatgagccctttgaggaccctcaccatggcaatgggcagttcaccgagaagcgggtgtatctcaacagcaaactgcctagttgggctagagctgttgtccccaaaatattttatgtgacagagaaggcttggaactattatccctacacaattacaggtaatgttcctttctgccgaaattctccattcatatagaaaccaagtatgaggacaacaaaggaagcaatgacaccattttcgacaatgaagccaaagacgtggagagagaagtttgctttattgatattgcctgcgatgaaattccagagcgctactacaaagaatctgaggatcctaagcacttcaagtcagagaagacaggacggggacagttgagggaaggctggagagatagtcatcagcctatcatgtgctcctacaagctggtgactgtgaagtttgaggtctgggggcttcagaccagagtggaacaatttgtacacaaggtggtccgagacattctgctgattggacatagacaggcttttgcatgggttgatgagtggtatgacatgacaatggatgaagtccgagaatttgaacgagccactcaggaagccaccaacaagaaaatcggcattttcccacctgcaatttctatctccagcatccccctgctgccttcttccgtccgcagtgcgccttctagtgctccatccacccctctctccacagacgcacccgaatttctgtccgttcccaaagatcggccccggaaaaagtctgccccagaaactctcacacttccagaccctgagaaaaaagccaccctgaatttacccggcatgcactcttcagataagccatgtcggcccaaatctgagtaactttatataaatatctcatggggttttatattttcatttgttgttgttgtttttttttaagaatcttctgatagagaaaaagactgctttgtcactcaaacatgttccttcgacctttcagtgtgcatgtgactcagtaacttcacatagaatatgattccctaagtatgctacacagcatcatattagatgtaagatgtaagacttgcaaaggacagaaggaatcttctgtaaccacatagctgtatgccagagaggaagccttgttattgggcatttgatgaggtttggcatggacttcaaggataaatgaatgaaaactttgcaccacttttgttacaaggtacggtagaaaatagtgaagtcagtttcctctcatcaaatctaaaattctccaaaatactctcaggcataacatacttagctgttaaattttgaactgctaattactaatacttgaataccaatagttactgagattcctattttgtggttagtctgactcaggatttggagcctaattaactctaaacttttgaaaattttaatcatcaagctatagaggctccaagtgcaattaataataactcatttataccttccacagaatttaataaagattctacttgtttctgtcttttaataactttccccttttgtgcccttgtggcctcagaaatccttaagaattgcatggatgaatgtgaccataactgattttggaatggttcagtttaggaaccaagaggcccaggtgaggcaacatcttttttctctacaggtaccaacaaaccttgacttgtcagcttccatcatcaattaagattctcagaatttgcaattaattgaatagaattcatttactatctgcccactcaaagaagtacaagggtagagtaagctaactgggctttaacatggtcagaatgtctggtgcatgaactataaaaaagagaactgtctcccatccccttccttgttttactcttagtaacatccagaattccctggaacagattgcctaccaccagaccttagaaaagactgtcattctcttgctccttacttgaaatacaaatattgggaatgtcacagacatcaagcaactactgtcaagtgggaggagagaatgagcagaattgctgactcctatttgtagagtgaaaaggaggagtgataatagatgcccttctgtctagctttcctttcttcaactagtggtaatgcaagattagaatcaaggttgacaggaggcaaggtcactcactgaagtgacagaaagacaattctcctttgctccaaagagagaaatctgtcacctttgcacctcactgcctttaaacacagacgggagggcaggccaaatctcagcattgacttttgtcctccaagagaggaagagaagaagtaattgggcaacttggaggcccgcgccccagctagccttcctgatcgtaacctccaacctcaggaaagggaccttcccaaaacacagatcccaaaggaaacaaaatagaccaaggagcataatctgcttctctcacacagcctctctgccagtggaccctgcctgcttccctctcagtgctcagcactctgtgtagtgtctttcaggttgatacactctcccaaggtgcaggcgctggccccatgagcccagcaccaaagttttctaagtcataggtcagactgtcaagatcatttctttatctataggttgatatttagcttaaaaaaaaagaataaacctagaactcaaaggaaacctgttgcaaatagcttagatcaacagtgtatctcttccctaagaatgatagtatcttagtaagacaccttctatgcatggtatggaagcatgatttttgcttgtgggaaaacctaatattttatcagacccctcggacttctcaatccctcgctctccacacagtagtacttaatgaaaatgttttgctttagagagcaaaatgctactttcagaagacactgaaatagtatatgtatttgcttaccatttgcaagctaaaatcaaggtgggatggggtcattattttcacatagaatgtatttattttgtgcaggctgttaaacacatctggcacctagtttttccattaagagcattgctattttccctttttataaagtagcttctgctgtcaaggttaacaattctatatgctttaggaagctaagttctaatttccttttgtgagtttcatttcttttataaccagtatgttaccacagacatcagttgcaaagctacgatgatagtgtgattcttagccgaaaaaaaagcgtgtgctcttaaagtatgttcagtttttctgtctacatatgctttgtgtgagttaaaaagggggtgggtggtgtagatattcctttagctgctttgcatatttaacccagtcatcaaaaggcataaatgacttcaatattttatatatcttggttttcaagtatcatttcacattctctatacatgactttgttattgtggaatacaagcctgcaatggatgtatatatacagaacattaataattcttagaaggatggaagccaaatggctgcatgatggaaattagaagaaaaaaaaagcagaaacttgaatttgctaagcatgtttggggggaaatagaatccttaactcagtgcctctgtctgcgatatggaaaccttcaactttgttcaccaaaattgtattatacctgtgtatatatatatatatatatataaatataaatatagtatagtgaatcagacaccatcagttttaagtctctggtagccaaacttaaataaataatccatagaatatcacatacgttcactccatcttcatctctgaagttagtggagaccatcaaaatgactgtacatttcataactctgggaagatttcaaatgtgaagtgcccctgtgcattttcttggccatagcacggcattcttgctttagctgtgctttcctgggatgagaagatcttggtgtatttaacacataagctttgttagaaatcacctctgaagatcatttcattttctcactttgggttgttgcaagacaaagcaaaggaaaaggaacacaatgaaggaggccgtgacatttttagttgccaccgttgtaactcaaacaatatgggtttgttggtgaactgatttatcaaggcttctgttatggttttgcatctgtgtgtgaggaaaattttaatttatttggaagtatttattagccatgttgttggtcctgaaaataaatctctaagtagcacagttgtgggtatattatgcagacacttaccacaatacctgcaaaagtaactgtggttttctttcaagacactgtaataaacagtgaactaagagaatagattctgatacatctcgataaatcattctctgcaaaagtttcagggctaatgtatttatgtgtatttttaaattctactttctttggcatctcttcatggctcagcgacaacaaagtaataggtcattggctggcttacgtcgataggaattttactcttaagaagggccagtgtatagctgactctacatataatgtgtaatcagataatccaatagagaggaattgtccaaatagttttagtacctttctgatcatctgactcagtaggctaggagacaatctgtcatctgagccatagttcttgagatttaaaaagtctgtccagtgactgcaatctgattatgaataaactattttaactattcattcttgctgaaactgaagtgtacacaatagcacactgttggcatgctgaggcaaaacattgggttcttttgtgttctaccttcaaaacaatctgtttgcatttgaaatataagtgtttaagctttttaggagttagtgtaataagagaatgtgaatatgttgggaaattttcagatgccattaataattgtaattttgttgttaaattaacaaggactttaggataagcctctcgatgtttttgctttaaattgaaagcatgtctgtcaaattgcaagtctcccttcagtttctatatatcacccaggagagggtctctgagttggtgttgtacctgtaccactcacatgtagctcaagtgtaatttgtagtgtttacattcaagctgggatcttgattggttaaattaatccacataccactgccactgctgaaggaccaggtgttggaatacacagcattacagactataagcaaagc

SEQ ID NO: 1476 - protein, 152 aa, Homo sapiens; identical to SEQ ID NO: 1472

SEQ ID NO: 1477 - DNA, 427758 bp, Mus musculus
  misc_feature (1)...(427758): n = A,T,C or G
agaatcctcacaacttagaagagttagaacttaaggaaaaatctccaacttttaattaagcttagaaaacttgtgtgctggctagtgtttactgtcaaactgttacaatatagagtctcctgagactctatacacacagatacacacaaacacacatacacatagttacctacacatgtagacagacacacacaggtacagacagacataaacagaaacacacacatagacagacagacacacagatacagacagacagacacatgtagatacacacatagacacacatagatacacattcacttagttacccacacacatagacagatagacacagttttattctggtctcattggctatctccgtcaacttttggcagcagtagtatagtgtttggcttcagttttcctcgagtgtgcgtgcgtgcgtgcgtgcgtgcgtgcgtgcgtgcgtgtgtgtgtgtgtagtacaggtttatgtgttgagcatctctgcacatggaaaccagaggtcaatgccctgtgtcctcttctcttgtgctccaccttattttttgagacaaagtctcccactgatctgggatctgactattaccattacccctcacccctcaaagtccagtgctatggatacgcatcaccacgtcgggctttccaccagactggagatctgaacccagttcttcatgcttacttggctgccctgccctgaaagtgttctgattactgttcacgtccagtgtctagcattgcctcagagggcagagggagcacttcagttatcgctttttatagacactgtcattgcaaaagattcttgttcttcctccttgttagaatcacacttactgcaacatttgagcagattccaaggctgcggtaggtgttatcattctagttcgaaggtcataccagccagagacaggactgtatgttgcacagtatgacaagtaagatcacacatctgtcagaggaacaagcctatgattatcccattgactgctatgaaatggccccaagggacggctgttcttgtgtgtcactgacttatctgtcaggtcacccatgttggacaaacacacctggtgagccacttcaccaagtttcatttgactctgtcttatgttccttggtagaagttgttatgtatttgctctcaaaacattctgaccaaaagcgacttaagagaagaatgggtggatttggctcatactctcagattacagtccatcaccgagcaaaatccaggcaggagctcaagcagacagtgacattacatccacaacagagagacacgaagacacccatgctgcctgctttctcccatctagatttcttctgtcatatagctcaagccccctgcttagggaatggtgccacccacatgggactggggcatccaacatcagttaacaatcaagacaatttcccatcaagatgctgataggtcaatctgatctagacagttcctcaattaagacttacttcttgggtaattcaaagttgtggataattgacataagaaaaaattggccactacaccaacacaacacatccaaactaaaccagacttcaaaaaacatgttttttttgttttttgttttttgtttgcttaactcttgttgttgttgaagatagagtctcatgtacccgggctggactcaaatttgtcatagatgactttgaactcctgatcctacaactccctagggctaggatcacaggtggttgccagcactttgggctggcatgttttcatttgtttcaggttttattaggtaaagatgaagaggtgaggtggcgaatactctgaggagttgtaatgagttggtcattattgaaggtggattacaggtagatggtattttctgtttccagctgctttttatatatacttaaaaattattaaaacttgccgggcgtggtggcacacacctttaatcccagcacttgggaggcagaggcaggcggatttctgagttcgaggccagcctgctctacaaagtgagttccaggacagccagggctatgcagagaaaccctgtatcgaaacaaacaaacaaacaaaattattaaaactttttagctggcatcacagtacatgtgcgtgatcccagcatccagaaagcctgaggcaatcaagctgccaggagttcaagaccagcctacatagcaagcttgaggccggtcttggttacatcctgagcccctatctcaaaacaaacacttccaacaagcaaagtaaaaatttaatttgttgatcatggtaattcttttgaggacagaggctactggctcaggttagaggactcaagtgtcatgcaagggcaggcacttccccctcaggaagcctgtgaaggtgccatagataacttaagtacctgcttccattctgttcaattaggagtgaatggaaacccgaagaaatcactggggtcctttgggagagatgatgagctgtgccactttataatgggagctgaaagtctttttatattccacccgtatgacctctccttgttcccaattggttgtcactgggagtgtcgtggaaagaaagaagcttgggaggcagaatggacttagtggggggagctctgaatctacttgaatgctagatactggaaggttggggatgattgaccttgaatttgtatgacatttttgagtgcttaataaatacacacacacacacacacacacacacacacacacacacacacacacacatcacctgggtatctttctattagaaaaatcctgggctgtctatagacatccctacttttagttgggcaaatagagacctgaaaaaaatctatttctatggattacccaacatacccaagccagtaactgcaggagatggtacttgaatccacgttctctggctgacttctatgacctggctgtgtggggaaacaagaagtaaaatagggaactcacaccccccaacctagaagaaagaagttgaggtcacagccaccgagactctccggggttggagagggggcaagggacaatgttttaagctagacttctcaatgttttgcactcaaatgctcctctctattgtgatgctggccgtaggaacttgtgagaccagcatgatggctcagcaggtaaagggccacacaagactgatgatctacgttcagtccccagaacctccacaaactccacaaagctgtcctatggcctccccatgtcacatgcgggtcttgagcaggtcccatgcagctaagcaccgtgggtgaggatggaatggagctgctgcatccagaaggcagggcttcacagcactcttctccactctccagcccttacattctttccacccaatgtttcctgaacctttacaggtaggaagtgatatacacgtcctgtttaaggctcagtactcaacagctactcgtgctcagcgctctgaacagtgtaagtacctgcattaactcccacggacagccaacagaagcctctctcgggtcaagatggagggcaacgctaacagatgcgcaggagtaaacacaccaatttctcgggtgctttgacactatatccgtttgtcaaaataatagtagtagcctctcccctggagtccacgacctcctcctccatggaccctcaatgaggtttatagcaccaggcatgcctttctatggtgagcctcaaatccaaccagaaagggattagttaacccattatacgcatgtcactatggcaacagtgggcacatcttgctggcaagttgctactatagctcacagggctcagagctaggtaagattattagtgacttctaggcaagcttctggcattattgaaactaacttgcacggtagaacctcctcaatctagtttgacttctctatatcctaaatgcctcactaacattttttaaaattatatttctatatgtatgtgcttatgcatatccctttcctattctaccattctcctttttagtgtgtgtgtgtgtgtgtgtgtgtgtgtgtgtgtgtgtaccttgcatgtgttaagtatagccctgcctctgaaatctctgaaatacacccccagtcctagatagatccttttaaaaagtgccagcatacacacttctggttttgactctccactcatgtatctggaagttatttctgcatctgtgtgtataattgatcttatttttaaatagctgcaatccatccctggcatacaaactcatcatagctgatctaactagtctcctaacttgatattgatgtctgtgctgcctctctgtgtgcctgtgtgtacacattgcagacacccatttggaagtggagttgctgggccaaagtgtttggagtattttagattctggtcgtcattgccccatttctctttatcatatctaggatggttaattgtccgatcgacaggatttagagtctcctgggagatgagcctctgggcatgcctgtgggaattatcttgatttccttaattaaggtgggaagattgatcgctgtgcagggcgtcattcctggctgggatcctggactgtataagtggagaaatcgagcagcatgcccgcatgcattctctgcttcccgagtttgggtgggctgtgtccagctgcttcaagcttctgttgcctggacttcctctccacagtggactatgcccttgaaatgtaaaccagaagaaagatgttttgttttgttttgtttttctccctgaatttgctttggccagagtattttaccacagcaacagaaaacaaaaactaagggaacacctgtaacggttttgtgacttaccagtcatgggtgatataatgcttattccacccctttactgaatcagtgtgtgcctcgcatttcaaaactgtccaaatcttacatcacagtgtgattccattatgatcttagtttacattaatcttattatgacatggattggggaatcttcttgcacacacttctttgtgtgtgcaagcctgtttgagaaggaacagggatgtatgtgtttggaggttggaagtcaagctcagtggtggttttcagacattgtcagccagtgtttttttgagacagggcctcttattgccctgagattcactcatttgacagtgaactcccagagatcccgctgttggcagtttctggatcacgaaagcacaggctaccacacccagcaattctcctgtggattctggggattgaactcatgtcctcatcctctccaggcgagtactctcctaactgagccatcaccccagacacttgaagtctttctcgagaactctctggccaagacatatttacctctaggatatgatttctcgattgtctcttaatttggacttttgagttaactcacacactatttttaagtctattgtctgtataacaattctatgtggctgtaacaaaatacctgaggtcaaataccttacaaagaaagatagtttttctggcttagtctttgaggctgacagttcatgttggatggcttcatctggtgagaagcctgctgaatatgtcacaaggtggtggaagaacacaaaaagaaacagctgtgtatagaagggaccgcacacaaccaagtttataataataacctgctcagacaagtattaatgccatctaagaagaactctggtaatcctctgccagggtggagctcatgacttaatatctgccttccgctaagccctgccttttaaaagccccactgcctctcaccgttgccacactcagaaacaagcttccagctcacaaagttttcagggacaaaccacatttaaaccagagaaactgccttggaaaacatcctattttatttgaccaggtttatttatggcttaatttaagggaaatcagcatttctatttcttaaataaaggacgtctttacactcattcaaaacgaaaagtagtttccaacaggtgcattcagtggctggggagatggctcagtggctgggagtgcttgctgtccaagcacgaggacctgagtttgaatggcagaacccatgaataagccaggtgtgtctataactacagcactgtgtggggtggaggcaggaggattgctggggcttcctggctgacagcctctttccgggttcagtgagagaccctgtctcctggagaataatggagcagaatgcctaacctatcctttgcctttcatccatgtgccctgcacatgtgcacacatacataatagcatatacacacacacatacaaaataacagaggcatttgataaaggataattgcttgtgaagcttaaacttaaaagggatcagaacagaagcaaggtcaggtcagcagttgtgcagtggtccagggaagagttgatgttgggcatatactagcgtgcggtccaaggacaaaggagatccgtccagggtgaggagcacacgggacgcctctcagactggatgagggggtagactggagggacgaatgggaaggcgctttggccttcagcttgagccaaagggtgatggtgatacagaatgtctctgtgggacagaggttgctgagagaggtgaaggcttgcttttaaaagacagacccaaaggtcctttcaggtcacatgccataaactggaattaagtagagtgttactgggatctccactaaactccacagtatctttctgtgagttacaaaaaaaaaaaaaaaaaaaaaaaaaatggcactccttctgagaagacagaggtctatgccttgttgaggagtacgtgacctggattttagctgcttcccattctactgtgtctggaaggcctggcactcatctctgctggggacttctattcaccagctctcaaagcttgtctgacaatggcccctgcccttatagtccccttgtcatttggaccctagtctatttattaccagacttcctagtcactgtaaatctaattatctgccggattatagtctaatttgccatcttacctttccccatgctttctacatagtaagttgaaaaagcccaaataatgacaggatttttcaatacttaagcagttcgtactgcccagtttgaaaaatggctcatgtggaattcagagcaggtggcttcacagaacaaattgtatcctgcacgtcaagacgaccaacattaagtaaaccattctcgtttgaaaacattaattcaagaccctgactttgaccctggcaccaagctcctatgtcaccatagcgtagatgacacctctccaaggagtgctgactttactcttcaacatcagggtagacatggatgctgcattccacccattatcttcagttcttttctggtaccttctctaggaaacaacatattaaagacaatcaccagcactgagcactgtcccctcaggaggtcacttccttagtcttctccattggtggctagcgtgagggaatggggaccaaccattcctatccatgctagaggcgcagctgtattgctcagtaactgacaattctccactctgggtgcaccactcactctgggctgagcgagcttaaatgaaggcagttgatgcaatcacactcagcccagctagcaatcaatgggctttcagttagccatttctcttcatgctcacaggacagaagctagcaagtagagccacaaccggaaaggaaagagacatggcctccctcctatctacgcacagtcaaaagcaatcacttctctccccaccccacccccacagaagatgccaggctgatgcccagcctgcctggctcttatttatattcaagaatgcacaaggcaaccccaccctccatttctctccgcttcaccctcagtgagccagggaaatagaagcttgtctttattaaatatttgaggaagacccctgtcccagataaacacggctgagtgaagggttgtggcttcattccaccatgccccatttcaagcacaattatcaactaaacatggatggtttgagacacccataatgtgtttttttttgtttttttttttgtttttgtttttttattttacaatttgatccattttcctagtgtgctttgttcttcatttttctcctgcctcttccctgctcgcctccttggcctggaagtgcttaaattcactttccacagaatatcaccaagcaccagcagtactggctgcgctgtgtagccctatcaacttgacacaagctgacaccagttgagaaaatacctccataagattggactgtaggcaagcttgtagtgcattttcctagtgactgatggaggagggcccagtccattgtgagtggtgttattcctgggcccatgatcctggctgagtaaaccagtaagtagcaatcttccatggcctctgcaatcagctcctgccctcaggttctctcctggcttggcttctctcagtgggctgtgattcaggatatgtaagccaaataaaccctttcctgttcaagttgccattggtcatggtgtttcatcacagcagtagtaaccctaagacacttgctcaccagattgtaaatgggtcagtgaagagcctggtctactgatggctattcagttgcctgcacttgtttaaatgtaaaagctatcttttcgtcaagagtcacaattaggcaatcttggaaaaggatagtccttcgtggcttatgggatatgctgtgagctagtatttcaggcgatttccctcttttaaagtctgcacttgagatcttacattcctgatcctcttgggatcactggctggtgttaccatgtccaagttcaagtatgcacattgtcttaatggatttgtattctacaataaacgaagctgatgcgatggctcatctctgtaattccagcactcaggagctgtgacaggagtattacctcgagtttgggaccaccctaggccgattgggacaatgaacttcttgttggtagagggttgctctgtcccaggtttagaatcctccaggcagacctaataaatattcagcaggcgctcggacagcccagccccaagtgcgccctttgcatacatatccattccagctaccccttcacaagcagttttacttggtaatttacaaatgttctggctgaactctacacctgccagtatttcagcaattagcttaggatgcaaaatgatttctaagttaaggttctggacatgtaaaatcaagagagcccgatcatcttcgggcaccacagctctgatagccaacgaataacatcacaaaccagggcaagccctttggcatcttaccgggttattacgactgtcatacaaatctatataataagcaggtgaactgcaggtcaaagatcgaagggatgtaagagagccggcaatcagttattcaaaaccgctcccttttaccgactcggaactgagcgagggttagggtttgggcattttagtggcataaacgactagaatgacattttggtcaggtgaaaggttaaacgggaaagaggctgataaaaagccagcaaaccccccacccccaaatgcctgtgggtccaggtagctagacaaggagctacctctgtacctgctaaggtggcatgggggtgggggtggggagcgctccgtgccgggttccttcggggcacaacttccatcccagaaagaggaaagcatgagcagagaagcgtgagtgggtggaggaaggtggggagaggaggaggcccggcaccacgagcggaaggagaggaggagaaaaaagagggaggaggaagcagaggaaaagggaggaaaaagaagcgggcggcggaggagaaggacccgcccctcccggcttcttcctgggctgggcatctccagggcctctccccgaccgccgccctcggcagttggcggggctcacaggggccccccagtctgcgtgtccagctctgtgcagcggagcgcagaggcccaaggctcgcccggcgcgcgtccccgtcccgcgcgctcctactccaggccgcgcgcgcgcgtgcacacatacacacgctagctctccgggcatgcgcagtgggcggcgccgctccgggccgcctcttgccgccgcgagtaggaagcgcgagcgccgggcgccgggctgtcagtgagcgtggggccagccagcgagccagagagccggagagagccagagagagcggctcggctcccagctccgagtagcgcagcgcccgcccggctctcccgggccaccgccgccaccaccgcacctcatcagcaccgccacctcggccgccgcccccgcccaccccggccctccccggctgctgctccccggcggaggcaagaggtggttggggggaaccatggctgacgtttacccggccaacgactccacggcgtctcaggacgtggccaaccgcttcgcccgcaaaggggcgctgaggcagaagaacgtgcatgaggtgaaagaccacaaattcatcgcccgcttcttcaagcaacccaccttctgcagccactgcaccgacttcatctggtaggtgcgcgcggcagccctggggacccaagagccacctttgccccggggctcaggtctgcttgtccccgggacttaagctcggggacgtctctgagccccggcgcgtccttactctcagggccaggactcctccgagaacttagagtgcctggccggagtccgaactctcgccaggagtgacaggcgcgcacccacgcgggacactccctggaaagtggcccggcgctgccacgcatgccctggtgccctgaagggacgcttggctctgcacggggtgactcggatgagggggaaggtcccctcgcctctcctagggcgcacaggtcttccctgtcaccaagcggagcggtcaatgggcctgatgggagcgaagggacaggaaagagagattgctggagtcaaagtggccccaggacgcgcaagaaacacgcccgggagtagcggggagccgcggcgcgccgctccaagttgctggcgagccaggctgggcgcgttccggggagtgtttgtgcctcgcgtcgggctgggactccgctggaaccttgggtccctgcctactgtaggctgtttctactgggcacggagactttgacttttctggccgagcccagagtggggagagaggggagggagagagatggaaggcagcaaactgttgaaagcttgccgtgggggaggagggctaacccggcaggcaaatggcagagggcagagggagtcatttaaaatagaccctgtcaacaggagattaaacctgtaacccagttgatgaggacagagggcttatttaagaaaaatactgtaatggctaaaggtgtccgcgctcaggtgatttccactgaacgccaagcgttggcaactgaggggcttgataaaaagaagggttcagggatctatctctctggagcctgtgaaattaggtaaaattggatttatgcagatttatgtttttctttttaaattttttttgtgagagaattacagctttcatcagatttacaaaatgtcagtcccccccacccccatcatatcttagaaatcgtccccctcccacgactttgaacaccaagtgtcagcttttcctggggataccctgactcttttgtccatgtgtttggagtaagaagtaccttagaagcaagaactatggccagggctccttagctccctcctgggcagggagctgcaaggggcgaagcgcacctagacaccaagcagtcagccttatacataatggggtatcctagtggctataggacagatggtgctgaatccaggccacccagagaagagaattaaaaggggaccccaccatcagtgtgccaataagatgcccgatttttcctttcttttaagaaatcattcagcatggcaccttggtgaacaacacaaccactttacagtctccatagagtagttagcatctgaagcaatcaagctcaaggagtgggtgacggtagataaggctccttaagatgagtctctagcaccggggtaagggaggatattgcatttggcaggttgcagcctcccatgttaaccgcgagattctagtcaaaagggacagagtgataattacttctacaggaagtagatacattagaaaaacgacgtacatttttaccaagctcactaatcagtctccactctcactgcccagagacccagtctcaggccaactgatgagatcctcagggtaccggcttcactgcgatgtgaagagaaaggttccctttccctcctgctctgaatagctccacacaagcacaagagcctcatttaatctgaaagcagtcagttggatggccaggcaaccccaccaagaccatcttgcagtggatttaatttctctggtttctttcattatggcttctatgagtctttggtttgcaatttaatttcagtatttaagcacttgtattttaaagctaaatatttgaacctagggttttttggtttttttttttttgggggggggtagggtgatgacattaagataattataaaggaatgtagagtgctttgtaagtttaaaatgctctgcaaagcaagagattatgagccacctctgagaacattttgatgcagcgtgttctgctggaacagtgtttgtagtcaaatatccatgtcaggactctgtgcttacagagtcaattctctaaaatgatttacaagagcagagtagtctcagtatagactttgaatgccagtggttctcagtgaaaattggaccacagataatctcaaacacaagctatagcagcgatgttacaccaaatcggattccttcagcagcccagatgaactgtaaacagtgctactatttgacagttcttagacacatactatttggaacaaacttctaacaagctactttttggttgtctttagggagaaaaagtttctttgttttcaggactaaaaagtaagccccctgcccacccccatccccacccccaatttttaaaccacaagctcccttttgtcagagtattgtaagcaacaattttaagtttgaagtcatgttcttattttgaaatttaaataccaatcacaaaatggaaaagaccagatagatagaaacttggtaacagttcagcggtcctttatagacagatttacttggttatttttaaaaagataaatgcacacaggcttctagttaaatacttaggggtattttttccttattgagcccttgggtttcaagtatagacttttagaccttgtagagtactcgctcatgtaacttgctacaatgtggtctcggtgggaagcatgctaagatgtttgttcttgttttctgttttccagggggtttgggaaacaaggcttccagtgccaaggtaagctgcctcggtgggcttcatgtccaagtacatccagaagtgagcactgcacacgggaactgtactttttttgctcaacgtttctttgtgatttgaaagatatgttacttagataatattttcaaaacacaagtgatgatagtgtgttccttttaaggaaaaaaaaaaaaaaccatagtattgcctagtaatctgcacatagaacttccttttctgttcattgaaagaaaaaaaaaaaaaagcaaaagccgtcctgtaattttattttattttatttttttgctgagaacattcctgtcagaaacttctgtctttgtgtgggtgtttagaaaaaaaaagggggggggaaggattgctttgtattcatgtgacattttcccccctttctttcctgaactttttcaccctatacattgtatacccgaggtaattagttttaggctatacataatttcaagaaagttgtgtagatcacccattgccaccaggaacaaagtatgcacactttgacattacgtcagtgatatagagtgattgacagttctaggatcactgtgcggtgcgcctttcctccagcttgcttccatacttcatgcatgctctcctgtggcagggccccacggggtttcctccctcacctacaatggcattgtgttcaccacagccaccattggtgagcagccatcaaatatctaactttttatattctctgtcttatctgttgagttagataaataactccattatagctcgagaaggcgtttcaagttccctggctcgcctgctggcttctctgctcatcgcctatagcatgtttatttagttccagttatatttcccatctgggcataggtttattattagggcaagtggaaagtacattctagcctggaaaataccatcctatgactgtctcttaataagtgtattagagagaaacacagcgtgtgcttttctattttacaagggatggtgtgttattaagttgcttatctttttgtaaacttccaatttggtgaccttgtttccaagacatattagagagggacattttatagcataatgatcattaatactgtacctttcttaattccatggtgtgcttagaattctgattgaatgaggcgttttgagtattgggtattccttttaaacgtagaggcaagccggctgcatcagcctttgtagcagatgaaagaaagactttggttctcaaagttctgggcccgaattctatgcacttggttttgggtctaggtttgaatgcgattttaggtaattcaaagatgcaaatgagatctaagtctgttactattttcatttggcttccgtttgagtcagagcctatggaaacttacaagaaaaatagttactgaatttcctcaaattgtccaggagaaagtagatatgttgttttaaaacggtatcatttttttcccccatgacaatgatttagagtcatccggtctctgccagctcattggccagagcaggtattgttgataaagtaacagtgtggtcgtggtttgggggtcaccagttctgtgagattccctacactgtatgtgctgagcttccagtgggttctccgatcaatagcctcctgcctcataactcccttttatatggtttctttttaaaaaatatactcataaaatgtttaaaaggtgaaagagtccactcctttctctttctacctcccagggagaatgtctttttaaaatacccatttagtttccattggtgtacactttaattgtaagagattgaactcttaggttatctgcgcagggtgcgttcattgtttttcctcagcagatgctaagtagctgcctgggccagcctcagttctgtctgattctacgaagtggttattcacccttgtctcctccactggggatgtcagttgctactaagttcacccagacacactacagagagtatccctgggaaccagtgtaggtgcttctagaatggatacctagaagtgtggaggtgcgcattctaaattttaatgggaaccgtaaaattgtccaaaagggctccaatgtacagttcactatgaatgtaaggtgtgcttgcccttcccttcactctctgagtagagaggctgctatagaaattggctttatcttttgctaatgtcaggggaagaggaccttacatttaacttctgtctcctgggctattagtgaggtcaaagccctgccccatgtgcagtagacatttgtatttcttctgtgaatttctttactagatttacaataatacatggacaaacacactatacacaaatacaaatacactaattagagaagaatgctttctagccagttcttggctttaaagaatttaccttttgattgccttaagtaatgaatccccctagtgcaaacacattttaattcctagtaaccttttcaaggatgatgctatttagaagttctagctgctgctacatcttgtttagtgtgtatcatctgtgcttgacttcttgtggccatattgtatcttattgtggtaacttaattaagaaagatgctctgcctagggcagtgcttttactccccaagcagtacttaggcagcctgacttgcttttaatgccatcttaaatccagtctttctctgagcacctgaccatcttggaatacatttcagtttaatgtctctactttctctcctttggttctggttattagaaagttattcctattcaggagacgaactcatcatgtacaacattggacagcccccttcttccaaatagtagcctgagtttagaaaaaaaaatttttttgagaaagggtctcactgtgtaagcctaggttgaccttgaactctcagagatcattctacttctgcctcctgagtgctggcattaaaggcataaaccactatgcctagccctgaagctttttatattcttagtacattgggtttttcttgtatgatgacaatattttctagctacagaaacagtttgttgttttggtcaataggttaaatagttgtagcaatggtaccctactcctcctctcctgccccttcctccctctccttccctcctcctcctcccctccctccctctcttctctgcttttcctctctcttcctcttctttctttgcacatgttgtaaataagagccacatatccgtgtcacaagtaatatagctttgtcatagttttgcttagtggatggtaagaattatgatactaaattaataaatgaatttcagccctaaaagcggaatctatatcactagaagaagggatttgatcaacacgtggaacacttaagtttatctccttggcccaagatttagtaaaatgggatcaatcagggcaacttccagagaagtgtttgttgagttatttgcgttctcccacagtggctgttgtgccattcttgtttctattgcattgtgggtacacaacgatgtcactaggcctgataaccgggaggatctcatgtgagatctactgtctggaggagatgaaaccaagagcatttaatactagggagaaaaaaaaaaaagctcactgtgggccctgaagccatgaaacagcttccttaagatcgtcagtgatcaagacaaccttgtctttttgtatctcttaaaggttggctgtgaggctcatagctgcttaccgattcctgtattttttatttttttttaacttggtgactccagggcttttttcatctccctaacaggagcaggtaattaatcaatcctcactcacgttttctttctcttcttttccttttttttttcagggaaaggaagggagaaaagtagatttgtgtagcctaggcattggtagcactaagtttgagtctgttgggcaaggaggtctgtgtccaggcaggatctctgtcttgcctcagctgcttccaaaagcacgcgtctaggaccgagtggtccttgctgctgttctctcacagagcctgagcctctggggctctctgctactttcactactggaaacggacagagccaagtcacttttttttcccttctcagagttagcaacagccctgcccatctctaattacagtggtggaagcagccgctgaaaaaaaaacttgtgacctgcttctatgaagtgccaggcagttactcagagtttgttgcatctagctggcctctggattttcctcctttcttttcctgttctctctccttttttggttagtatctatgacacattaaaatgaactttcagcctagattgcttggttgaaatatccctgaggtagcattggaagacagctctgtctgtaactataggagtccatgaccctgcaggttcaaccctggttctcagaatgaatctgcatttctccactgcacagtggttaggaatcttgaaggtctcttgctagggacatgcaaatcatattctgtcctttacttgtgactccaccgaatctccaacttttctttaataaaagtcagcttttcttctgctgtgctgtataacagtttattttaaagccctgttaacatacctgaccaggatgggttttgcattctctcaagaaagtgaaaattggtgtttgacttgggggtggggggcaggaaagaaaggacacgtctctgcaatgcaagctgagggattccagagggagattcacttcatggaggcggactctgttttgagacagtgtctcatatagaccaggctagccttgaacttgtgatgtagctgaggatgacctcaaacttcccatcttcttgcctctgtctgtcagatgctggcattacaggcgtgtgcgctgtgctttgtttatgtgctaaggattaaatactaggcaagctctctaccagcttagctatttgctcaggccgagtctgacctttaaacagaaatggggcagtggggattgtgttggcagccttgtagaaaagggatgtccagttgtcctcatctgccaagtagtgtgggtaccaggtgccaggagatagacaagggccgagggccaagatgagcacaattgtgagtttggccaacttgaatggaatatttgttcttctcatgctctggaatctctgcctctgtctgtctgtctgtctgtctgttttgtggtgcttggaattaaacctaggaccactaagtggtttgaaggatgcacatcttataggtagcacaaaaactcaaccacctaaaacttagagtaagctctagctgcccacaggcttcacacctgtgtcagaggtttctgtagtcattcgtctataaagcagagactcgccctttgacctcccctttctgacaggttcctcactcctagatgatagttataactaaactcttttctaaagcctctttgtgcacgtgcatatctgtgtgcacctttgtttgtgaatggagctgcccacatgctccagcatacatgcagagacaggagagtgaactcagacagtggtccttgtcttccaccttgtagagacagagcctgttttcttccactggcttatgaactactggagattctcctgtctctatctcctatctccctttaggaacattaggattgcgtatctgcaccatactgctcgggctttcgaacctgggctcaggggatttgaactcaggtcttcatgtttgtatagtaaacatttccgctgaggtgtctccttactcccctttagatgaattcttggtgttaacttggaactctagagagtttgtaacaatgtacaaagtaccacactgcttgtaatatctggcacttagaagttgtagggaggagtgggggtggggagtacaacccaggctcatctcagcttcccctcctccatccagtaaagaattatactgtttgttataagtaggggttctaggctgggacaggtgtcagatattcgtgttgcatgccccttcttaagaggtttctgattaatggctgagtggctgtctttcacttggggagtgagtgtgctctgttgttttattaacacgcttcccccccccccccccgaagccagagctgcagtgtgtggagtgcttcctcccttcacaggcagcggggacctaacagatgtctacttttgcagaggggtttgataaccaggctccttcccttttgttttatggtttcttgatttcatgctctctgatggcagttccaccctctcatcacccaagctgaagttcttaggcacagcagcctaacttaggctgtgcatctttcctttatagagtcagacagaccgatttcaaaaacagctttgatttctgagctgccctgatctggtgccgttcagacctcagcagcctgtggctgcctgagtgtccccagctcttcccctgcctctgcagacttgcctgtttccctccttcatgtaggaatgcttcaccctctggtcctctggtccatcgtaagttgcagttgaccaggtgacatccgtgactttaaatcttagctgcactgtagcttaggcctgtcccaagctgccagcccttctggatatttatgcccatcatgggagctcgttactacatctctctgcctcactcttcctctgctgacggagtgcaggattgagacttctttctgtttgtgtctccagtggttagtgcagtgcctggtactttatagacactatgtgaatatttgttgggtgtgtgattatataaatattagaaagttatgatacaaatgttcacaaccaggaagatagtgacttttggctgagtttatttatttatttatttttaaagctaacttcttatctaaagatatgtcaaccttaagaggactcagctgctaggcaaaacagagagcagaaaaatccagtctgcatctcaaaagagttgtgtgtagtgctgacccgaataaattagcacagtgggagtgaaacatacattctttctctctgatgagaagtatgcaggcaccaggaataaatcttaccgccacaaataaaacaaggacagcttatgggctgtatcaggaagcaagatgtgttgaatccagggtgaaaaattgaagctgctcttcagggcacgtttgtccctgtcacttcaatgttctgttttcctttgagatcgctaatagctgaccccacattgccgtgcccaaccacattgatcctgttatttttaaacttcctaaatttgaaaggcttcttaagcctcaaggtgacgaagggatgagaatggtggtataaaatgtccgtaattgaatcgcaacagctttaaaggttttattcaaatagaaagaagaaaaagctaacattgttaggtgctattcaccatcatggttttcccatttcaggtgattttattctaaaagcaccctagaatctcctgtgcagaaggagagagttgagaacatctccagcctggggcaggggcctggattcaggttgtaatcgttttgaagaaacattcctccctccaactggaaaccagttcctttcggtgcctgtgaagcctgggtttatagacggggaaagaatgacgtcattaagagaaaaaaaagcacggagccacctctctgggatgagacttgagtggcctttgcagtcctcacccttctcagagtttccacagcaaacctttcatttcaattcttgttttccaccaaactgtgaaactcaggggagacatgaagttaagccataagaccagggtggggacacagtattaacagttagagtgagctaaaattgctaaaaccaaatttaaaaaaaaaaaccctccctattaaattatacaaagggggaaaatgacttgtggaaataggtttttgtgaagaatggagcagaggggaatgacttgattaattgccagcacaaagctgaaattattcagaagtccacaaagtaagatcgctgtaaggacagtccatctttcatgccgccttcccccactgtctccccacaccctgtatctacacatttctattttcagtattgtaagaaatgcaaggtccatctgtcttgtctgggcaactttaataaggaactgagaaatcactaatgatgcgaatatgaggcacgttgacatcttatagatccatttaggtctgatttgagcaaactctttttttttccttcagtgtgatatttatgcaaatattctaccagcaagttgcacccccagtcccaaccatgattctttggatgtatctcctcactcctgtgtagcacttatgagtattttcttgtgcttgaaacacaatgacgaccactttctcccctcttctcccatatagtgttttcaacattacacatgggtccacgtacttttctttaattaatttgaacattagttggcctcaacagttgtaaagaagtaagtaaacggtattgcttccattttatagatagatatgccagaggagaaggttttgatacatgtttacagtttggttgtggtagaactgggactcaagcccaggtctatatgctggattattaagctatgggctgtgctgcctctcatgagtctccatttagtttttgtcactcactgaccacgcttgattgtggaggtattgaaggatcaagagccaatacaacaggagtgtactttagatgcttggactatcattgcatctgtaccgttccaaaggtttagtgcacagcatgataagcttgtacaaggaacttatacatggagcccaagaagtcctccatgagagcatagaatcatgcctttacatctagtgtgtgcagaatattatattctagtctggatgaaatagttgtggaagcgtgtgggaaggcaacacatattgtttgtacatactagatgatggctttagatttagatttgggcttagagggtgtgtggaattttctttctttgggatgatgggggagacattctaagattaggaaatagtagcaggaagcatggtaggtgagtgtgttctaatatcaaaacagagcgggatgggtagctgtatgttaccagtcccaaccgccaagtcctagagcagatcggagaactgtttatggggttattggtgcctgctgactcagtgtgcagtggctcttttgcaaggatacattgtttcctcgtgtgtcttccttttgttcttactgtgtcttgttcatgtttcaggaagatgttacagtgagggaaattacgcatgtagcttcttatgaaagatacatcgtatcaaagtaggaaaggccctcactgccaccttaccactgctgctggctctctctaaggaagcctaagagactgattacagttgctttagaagtctagggctcttggtccatggaaattaggtctagatatgatatacacagttatactagctatgggagggaaaatataataagaacatttacatatttaaaacagacagcattattttagcaactagctgttcctttagatatttttcctgttcattcccattggctattgctttatttcttacagtctgatgcgttttcagcatactagagaactttgcaagagatgccgctgagctctggggctccaggttgaaatagaagataggttttcacctggacttttatccgagctcccaagggagaaatggcagtttgcgcaacactactcctgggctcacgtgtgcttacaatgtgtgcctattgtgctcttcccgtgcagagctggcagtgccacccctgcccagcagcagggacactggagcagagagaagttaaacagctcaccctccatcgtgccagcagggagtggtggcgctgggacttgaaaccaggcagattgagtgacagtgtgggtttccagggcagggttttcttcgcagctgaagccgcacacacccttttactcatctcgctgtatctgttcttccttcaggtttttaagcgaaggatgacttgtggtgatagctatagcaattgacacaaaggtctcagggaccagagaaagcttggcttgcacccatggaggctttgcttaattcacctctggatttacctctgcagccaggcatctgccttagaggtggagtacttgcctggcaaatgtgggtcctgggtctcatccctggcacaaaccacaccaaaccaaatcatgtaccatgaagttaaatgccaggactcagcttaaattcttttccatattctacattaatacttgaggcttcagtgggtggattcacacaaccatattactgccataacctacatggcccatagacagaatgtcttgaaatagaagaaggaactttactattgaaagcagtgtaaatattgattcctaactataatatgtaaaagaccttaaagtgcttcctattctgtcttgtaaattcaagtacctctcagtccagatgttattaccataaccattccacaaagcatgtttagcattccacaggtcaagagcagactacagtgatcatgttgggagtcattctccagtaataatcctagacttgtctttggagtaaatctagtttttaatgtgctgagtttggtcactacgtgtgttttgttcctccagtttcacactggtggcatccatctgacaactcagttgacagacatttgctttcaattttaaagtgtggctttcatattattttatttctctatactacatctatgcgattttcaaaaaattggatggttagtagttataaacagtttagaagcatgcataacttatttaatttatttatttactttttagaaccaaattaaagtttactgcctaaaactgacatgtgttccactcttagtctgcttaattgtgtagccagggtacacagagtaccagttagtatggggatgggcaacggagctgtctaatgtccaggtcatgcagtctagcttttaagattcattcctggacgggggcaggggcagttgatgggctgaggctgcagcttggtggactaaatgaatccagtgcaaggccgcacagcagtaacacagaagctctgagcctttcccttcaactttgcatttaatatgataacgagatatgttgctaatgcttttgtggatgctttggctcccccccccctctgtctctctccctctccctctccctctctctctttcttcctcccttcatttaaagtaaacccttggtctggggagatcactcagcagataaagtgcttaccgagcagatgtgaggtactcagtacccatgtaaaagctggtgtggtggctcctgcctgtactggtgctaagtgctgaagacgtgcagatcccaggggctcattggctgaagcagcaagctgtaggttcagtgagagatgtcttttcaaaggaagacacagcacaaacaaggaagatgaagagccatggagcagctcatgtgtttctgtattgcgctccgtggactggagtcagaaatgctgctgcctatgagcgcgggtacctacccagcaacatccgtaccacatccagcagcccaagggatgtttgtagtgcaggccccaggttcctctagctttctttggaaaataacagtttcttctaggaatagaatcacagctttcatttaactctaggagttccaaataaagtaggatggtggtatgtttaactttgataatttatagataaacagcctggcaattgtatgcaaatacctatttaaaataaaaagacttttgaatttgtattatattgagagttcatgagcaaggaaaagacttcctttggaattatataccgttcgttgtttcttagcatgccttgatcttctaccagaactgattttgcagtttaattaattaattaattaattaattgtttttgttctcttaatcttcagatgcacatatttttagtcatcccccgagcaagactcccaggctgatataaactgcggcgtttatatttggttgcttcgctcgcagtactccaagtggtcccactctcagaaaggaagttatttctagacaacagtccaagccagagtcagagttaagcctttgcttcctacagtttctgtgttgtagatttgaggttctgatctcagaactgtggacgcagctaataagcatacaaaataaacaaagtggcggatccaatgataaatgaaacaacaatgcttattcactccagttgccaatatttattttctggccaaagctgagtacaacactaaagtcttgtaaatattcctcaggggggggaaaaatgtttcccatgtgctgggtttatttctaagttgcattaaagattggccctgggattagcaaggtggctccgtgaatataagggtattttctgcgaagcttcaaaacctgagttcaatccctagtatctgcctggtagaaagaaatcactgattttcactgattgtcctctgaccttcacatgtgtgccactgtgcacacgtacacacacacacacacacacacacacacacacacacagacacacacagacacacacacacacagacacccacacacagacacacacacacacacagacacagacacacacacacacagacacacacacagacacacacacagacacacatacacacacacacacacacaataaaacgtaataaatgatttaaaagtcactaccaaaagatagttctttctcattggtgagttctctgggcatccattctcttgggcattccgtatcactctaacagtctttgaaacatgttcaagacctaaaactgaggaaggtaggttgtgttgaagatattctaaagacagtttgaaaccatcaccgtggatgaggtgtgtatgaatattggtgaactctttgactgtcctttcactctcattaattctccattgtccctctgggatggcagcctcctcccgtggcacacttccttcccagtagcccagctcacgtctctggagggaaatccctgggtggttctcggtgagaggagccttacatgggtttattccatgtgctctggttgtgtcaagcacatcttgtctcaaagtggtccagctgtgactagttctaactggagctccttcctgtcagcctctgctttaattacatgggttattaattaattaattttggggaactgggtctcacattgttgtctaggttggcctcgaaagcatgttcctcctgtgtctaaacttcaaagttctgtaattacaggtgtgtgccatcattcccaattctttgtttactttagaagaaataggattcttttcctaaactaatttacttttcctctctctctcttcctctctctctctctcttgctctctctctctctctctctctctctctctctctctctcacacacacacacacacacacacacacacacacacacatactttataaagaaggcagggagtttctccatctcccgttacttcccccagtgtcaacactgacacagccatcgtaccgtgatcaaaaccgggaaatgaatggtagcacagctatgttgccgagttataaactttctttgaatttttctcaaaatttccacaaatatctattttctgttctaggattccaattcaaatcccacattttttttcctcttagaatctctcttggccaattttctcccagtcatggaggccacaggttgccatcagttgtatgggtgaggtacatccgtgtaggagccagatgttttctttgatggcgattcagatttgtcctttgtccctagctcactgttggctgcactagagtaatgttactctgggtgaggtcagcttgttgtccatgtggttgctgggtggatgtctgtgagtttatactgcttgtcagcggcaggaatcctttctgtaagcaaggattaataggaatgcaaaccaccgatctagagattgcctgcacttgctggcagaaatgacctaggaatccctggatctctggcaatcctgaaagcccccatttgcctagacgaccactgaccgccccataggattttgtgccatcaggaaacctgtactgtgtatcattgcgatgcagtagccacagataccatctggctagtaaacccttgaaatgaggaactgaattttttattatttaattttaattcattaaaatttaaagttaaatggctacatgtgtattggagttttcagctttagagattccttggggagcaatgttgggtcataatttaaacctttgatggaacagtagaacacagatgaagaaagccacacaaaacaaatgcacggttaaaagacaggatcttaaggttgacattctggcgacacctgcctaggttgaataggggactcaggaagagctggtgaggttcctctgcctcctggtttgtgagactcctctgtattttctgcaagttgcaacttgatccaggcgttccgttgctcaggctcgggtcaagccgggtcatacagttttaaagatgcctttataacgcccttgcctgttacttatatctgtattattaatgtggaaagagcatcgacaggacattttccatcccatgaagcatactcaactgaggtcagttcataaagttagagtcatttatgacaagcctgccagcacatagcatgacacatgaagtacctactgtgtgctgtttgaggaaacacaaatgctcagggttctttctaaatacgcgcacatacacgcatttgatttctctgcaaaatttagtgtgcctgtgggtaagaggtgtgtctgtgtgtgggtgtgtgtctgtctgttagggtggtggaaaaattcgaatcaaattgttatatagctatttatttgtctaaacatcacccacatgactgtatgcactgtcttctttaacgttcttgtctttgcatttccaacacaagatcaaaattggactttagagttatttttgtgtttggagacatctggaggcaaagggaacgaacatgggagggtagagtgtggattgctcctagattggaggctcggcagcttaagcccgctgtgtacagaccctgttggcttttggattggagtgggggtttctaagaggctcgttgggagtttaatgcaggattaggtaagtttgaatgagcttcacggagcgctagagttttgttttagtttgttgttgttgattttaatatgaagaactgccaatgtgtgttaacctgttaaacaatgatcactttgctactttgagaagtgaagtctccactgggagtgaaacagccttggcttaggttcaggtctattctctcacattattcacaaaaggggaactcggtcccggttaggacacagatctggctgctcttgcctgcacctgtggcagatctcgctcactagtcattcctgttcctccctcaacttcagattccctctcaatgccatgttttaggcactggcagagagaggcgactccctgtcctccttggtatagtcttcccaccatccctcctggccgagtctcctctgaaggcaggagagatccccaggtactctagcttacctgcttctcctccattttttctcaattcttcataggaatgcagagtctctctcacacacaaatccatggtattaaaaaattgtttccctaaaaatattatcactcaggctagggagaaatcacagctgggaagcgctttctctgtaagtgtgaggacactgttttgagttagagcctcataatctacatttaaaaataatagactcactgttactggtgtattcttataatcccagcactagggacacagacacaggcaaatgcctaaggctgcaggccaacctgtttagcctatgctaccaagttacaggccagtgagagactttgtgtcaaaaaaaatacatgaattctgagaaatgacactcaaggttgtcctctggccaccacatgaacttgtacattagtatatgtgaatctacactgaatacacacatatacacacacacagatatacacaggcatatacatatacacagacacatgcagaccatgcacacacacacacatatacacatgtagacacacacacacatacacacaaacacatagacatgttatcactgaaattctgaaaatttcattttaacacactgttgctgttgtgtattggccagaattgaattggtttcaggtgaaaattcaaactaacaaacaaagtaaccaactaaccaaccaaccacccgcagaaaagccaaacaaagcatcactcatttctgcacgttatctttgtctgcaagcaccgtgttaaatgttagatttttctaacacgtgttgagtccaagccaatgtttatcactcagatttatgtgagtcccttacaactgaaatgtggcatttgagctgtatactggctagtgggtcttacagaactttgtcattctagacctcactaaaacatataggctgcaaataataaaagaaataccagcagtagacttttctgattggttttaagggggacagaagagaggataaagcgatcgcgtcctcatggcaggaaccctggtgatggtggatggtggggaacatagattgctttttcccacaaatatgtgcaaggactggggtgtcgctcatggcagatgtttattcaatctgtgtaaagctctgggatccatccgtgtgtgtgtgtgtgtgtgtgtgtgtgtgtgtgtgtgtgtgtgtgtgtgtgtgtgtatgcgcgtgtgtgcatgacattggaaatagcaggtctggatgccagcattcctaagactgagtgtggggagggggagaagtcctaaggggtaggtagttgcgatttattgaaagcctgcttacaatcctttgagctagctaagagagcccgaggattactctgagtttataggacggcgtgcttttgcatgcacaaatcctatttgtgcaaatctgacctttaaaaaacgatttctattccctttccccatccctctcctttctcctatcctaaagccagtcttttgtgcaacacttttagtcttatgtgtgatgtcctgcaaccatctggggctcgctaccatcggtcatccatccacatacccaccaatgttatgcatcagggatcactcggactctggggaataattatagtacctgtcatttattgagaacccccttgtatatagctcagtgttaaacacttaacactttttcccctaatttaattttgcaatcatgttggggtagatcatttcatggatgtgcctcagagagatgaaatgtgcccgagtgtgcctgtagatggctaagtgagcagaaggtctagtcgtgcaagcctgacaacccgagttcaaacacaagttccctaccatgggaggagagaagcggctccaggaagttgccctctgacctctgcatggagaccatggcatgagtgttcagtctccccagtccccccacacacacctgagtcacctgagtcacttatagctaagtgcctgtattagagagtctggggtggttttctgtttgtttgttttgtcctgaaatgggcatcctatgttagccttaagcttgagatcttcctgcctcttgctccatggttatatcccatgctggtctgaaacagacaccctaccccctacccccctctcctcccaacccccacctgctnnnnnnnnnnnnnnnnnnnnccaccaccaacatgatggctcttgaccatcagtaacttctgttcaggggatctggtggctttttcaggcatgcacatggtgtgtgtgtatgcgtgtgtgtgtttaggtaggggcaaaacactaacatataaaatttaagaatctaaaaaaactttaaggactggagagatggctcagtggttaagagcactgactgctctttcagaggtcatgagttaaattccccctctcctcccaacccccacctgctccccagactcagagtgtctctgcataagagccctggctgtcctggaacttctttgtagaccaagctggcttctaactcacaaagatcctttgacctctgccttcccaagtgcagagattaagggtgtgtgcatcaccatgccagttgatctgaaatagttcttgatcatgaattttattttgttctcctcaccataaggattttgctacatttccttaaaaaaacaaaacaaacaaacaaaaaaccaccttaacgataaattcctcatggatgtgtgtattctttttaaaagcaaattccccaccctgacagctccagtctagatgttatcttttcatccccaacacacataatgaaatgtgtgagatcttcttctgtaggaatgtgctttttaatttcctgacttgagtcctggcgtatgggatgtacagcatgtgtagtcatgcccggcagatcttagaccaatggcttcagtgacacacggggacagtggggcagagtttgtatttagtcaaaggctagctcagtctcaacactttcctttctaggagaatccttcctttctgcttgagtgtggagggttctatgcattcttgagatagctcctcactgcactgtgctgtggatgcctgtctgacctccacacttgcctgaaacttacagcctggctgccatagtctttccccatactgaaaatgttctggatacttttgtcactgtctacttctgtaaccttcagatggctaacatctgtaaacctctgtaagtctcttatctttactatttaggttcctcttctgaacttattctttctgttttgaccatgcctccattagcatatctctctcaaatttgaagtcgtccaagcgagcttgtattttagcttcaacatggcacatttgcaagggccttatttcacagaatgaagtctgagatcccagaagactatctgcttgtctgttttcaaaattgtcctatcagtaacacattgggtttgatgctggacacggagtaaataaagctgagnnnnnnnnnnnnnnnnnnnntttgtatgaggttggtggagtgtaacaacggaagcaggctgagcctgaggtcaggaaaaccttactcaagggaaatcgtcttttgagtgaactcacaaattgacaaggtgtgaccactgaagaagagaggaggaatcttgtaggagagcagcaggcactttgcaaaggccgcaggtgaggactgggaagcagctctgggttatgggaatgctctgagtaagggaggccccagatttggcagcacccaccttacaggtgggagagcttacacacgggtgctcccatccctcggctcaagagctctgggaattctccaaatggctttcagcagtgaggtggcatgatcagaactgccctggaaaagactatctgctatttttgtatgaagaacttaatttcagtgtgtaagagtggatgctgtgacctagtgttgggcctttttttttttttttctcctttgagacgtttgattcacgaagctgaaaagatggtgatggagaaacaaatccagcctgtattaagaggtagaatcagttggagatgaggctatgggaaggagaggtcggagtccaaggtcagggttgcagtgtggtatgacaaaggaagtggccttgtcttgtggaaggagagggcttcagaggtctctgaaggctgctagatttaggttctggagctgagaaggggactcatgcttgcaccaggctgagtcctatacttaaaggatggagtgcttaggcgagacccggaggggaaggggagagggctagttcccagcctttgtcagagatgcggatggaaatgattctgcaaaagagaggatgggggtggctgctgaggcaggactaaaactcggggctgtgacattaggaaggcagggaggaggggctgtagtagtatggttttgggagtcaggagctgttcccatgatccctgggggttgaagctttactgtggccaaacagacacaacagtggcgatgggaatgatctgggtgacagttctctggccagttactgagactgaggaaggctcagctagacagtgctcagcagaattcaccgacttccaggaatggctggccccttggaaagggtgggaccctggtcctcactctgtagaaagaaagagatcaggttgagatcttcgtatgccttccacacccaggctgagctgcatttcagtgaaacccgttctcgttctctctgcatgtctttagctatcaacagagaaggaagaagctggcaagtcgggccatttttctcatgataaggcctttgtctgtcaccgaggaagtgacccatccagccttcttcctttattcgttcagctatgacatttgtgtctttccataaaaggatttttttaatttctattttttctttttttagttatgggcttgtaatatctactcatcccatcaagagagatcagctggataaaatgtgaggcatgtacgaatttgctggcatttgggagatttcgctaagctagaatattgcattagggactcaaccccattttcaagcatttcgttaagaagctctctgggtgactgtaggagaatgtatttggaggggtcatttccttggatattaactagattacagacttttgtaaattgaggtgaatgcgaagtagcaacagggaaagcagtttgggacatgacctgtctaagggatggtgggagtgtggctaatgggtttccactctggtgtcagggtaggaacaaagcagaaggcgcttccaccctctctggggtcagacagaccatttatttggggttttgctcagcaagaattttgtctgtgttagtaattgctccatatttcaaatcccccgagaagtaccataaattaacaagttgctgtgtctacaaagatggccctgaacataagctttatttagtgctttgtggtgatgtgtagatatgggtgttaggataatttggaagcgtgtgtgtgtgtgtgtgtgtgtgtgtgtgtgtgtgtgtatgataggggcaaggtaagatagggatttgctatgtagcccaggctacctttatgtgtgtgatcctcccacttgggcctctctagtactggggttccaggtagggtcactgtggtcagcaagaatttggaatttcaattccctgtttcttagactcctgttatcagtaaagggacattttgtttgtgacagtcctagccatgtctactgatgacttgttctcgatgtttggatggctggccagtgcatccaaggcttcttgtcccctgcagtttctcccttggcctgacttccatgttcaggcataaacagggcccttctggagctgtcttctcaggactccaatacgcacttgctgtgctctcgcatgtgactgacgctgcttaatgaattaaatgtccctttgcttctgtcctgtgtcttggggctgacaaggtcctatgccatgataacatgcacccttgacgttcgaaggttcagcacaccagctggttgcttccatcttgctgcctgtgtgtatttgtgcatttatggcggcagcttctctacacagatgtaaagaaccttatggctggagcgcgaggcagtatctttcaggaccttatggctggagcgcgaggcagtatctttcaggaccttatggctggagctcgaggcaatatctttcaggaccttatggctggagcgtgaggcagtatctttcaggaaccccgagaaagagagactggagggtcacatgtgggctcttcagctctcaagtgcatctgtcactcattggctggagcaagccatgcgatcctctctgaggcagtgtgggagcaagggttggaccccggggaagcgctgaggtatttaaggagacttctctcctccatgctacctctgcgtcatattcggctctgttgttgtgacaactgtgttccctgcgtagctgcttggttgttgcttttccataattgaaactgtctcaaacacaccgtgatccgcacactatcatctctgttttgttaaagcacttatttttattgcttattttttttcctctcttatagttgaaggtttgatcagtgtttccctttcgaattcaacgatggtgatgcaattatctttttattcacaatatatcagggaaaaggcccctctctttcatctgtttcgaggtatggaaatataatgtctctcagagactagtaattctggggatgctccattatctttcatgttttaaagatatagcgatttatttttcttctatttctgtaagtgttttgcctgcatgcatatgtgtgcacctcatatgtgtatgccttgtgcctatggaggcaagaagagagctttggataccctgtagctgcagtttcagattactgcgaggaggagcctggtgtggggactgagacctgaagctgggccctctgtgagatcaacacgagcttccaacccctcagccgcccttctctccgctccccttagcattaggattttaaatatttttttcctgggcatcttttaaacacattgtttctttttttatgtttgcctcaccaggatgggacccggtatccttgtaccccagggcacatccttgtttggctgcttagctctcttctacataattctctgtcccttggcaggtttggtgccttaactgttttccagttctgcaaagacattttactcccagtgtcttgttcttgtttgtggcctgagacaaggagcctggattatgtaaatggatgggggggtgatgagggaacagtgagtgaagtgggaggggctcctggttgttggatcctgctgggattatcacctactggctggagtgcacctgtcctggccctggcccaggacaagcggaagtcaatggaattgtccttcctgtaggaggtaactccaggtactctgtggtcaccgtggtcaccgtggtggtgttcttaactgaaaaaagctcagtctgttgcgaccttcactttgtggttgggctgaggttttaaaaatttgtttgtgttccctatccctctgattaaaccagccatgtgtgctcattttacaaaagttgcagttgaagcataaaaaggaaacgaagtcacacctggtctccctgctcagaaacaagccgtgtcaatcacttgttgtacttctttcctggtgtaggtgcatgtgtgcattgcatgtgtatgtatgtgtacatgtgtgcactctgtgcatgtgagtgtgcatatgtgtgttattatttttataatatatacttatatttgttaaaatgttattttaggttgtttttaattagttaagaatacattaggatacaatttggttaaaaactggatgaaagacttgaatagccatctctgcaaagaaggtatacaaactgacagtgagcgaaggcaagatgcccacatgaccgcagtgaggtagatggaaatggaggccccaggaggaagcacttcacactccttgggattggctatttgaaaagaaatcggagccaagcaaaatccaggaacaacagcagccaagtctagagttaagacctcactctccctgttagcaagtgctgaacgccgcgccaagtcggagttcttatgctcgtgttggtgaggaatgtaaaatggcacggctgctgcagaaagcagtatgagggctcttcacggagttaaacagacatactctgtggtccagcagtcccacttaaggggatgtacctgaaagaactgaaagcagaggtctgtgtgggtatctgtattcccatatccatggtgatatccacagggcccagcaggcagagcatctcaagtacctgcagtgggtgggtgaagagataatccttaaattcgtagatagagtgctattcagcctttaaaggaaagacattccgacatacgcaacaacatgaacgagcccataaagcagccactcataattcgaggcattcatgaaaaggtacccgtgtgatcctgtttatacaagatgccaaggttgtcagatgcatggagacaaagtggcacagtgatgctggtcctggcagaggacggagaaatgagaaactggtgttctaacagtagctttaatccaggaagatgatggatgtcctggagatgggcgatgatgtttgcaggcatgcatgcttgaacatgctacagtatgcattccacacacatgtgcatcacctccctcattgctagcccatctttgaaaacatcgtgcactgttctgttttatcaaatcctttaccattttatccactatcagacattgacagattttaatttttcacttgggagaaacaccgtgacatgcacacctccacaccaagtacttcaggagagactccttggtgtgaaatccctgggctacgtagctcaggtggttttaaggctctcgatccttatcaccgcaatactttcagattattaaattccatctcaaccaagcagttccctggcagcagatgtggaagtcgtcacaccaccctaacctccatgtggtgtcactgcaggtaaattgctgacagagcctcagaatcgtatgtcatctctagttggtatcaaaagcatccccatcaccatcatttgacacgttcatggcgtaacccagggctctgagcatgctgagcttgtactcagccacggagctaacacccactggtagtggtaaatatttcctcgttttcattagtaatgcctgaaatacaaccggggctttcactgagttaaatgaattttctgaaagtctactagttactgtattctcctcagatacacagaccataatacccaacaaaactgatgcacattatacttcctggttattatactcatggtctagggcagtggttctcacccttcctaacgttctgaccctttagtacagttcctcatgttgtggtgaccccgaccatacaattattttgttactacttcataattgtaatttctgcttctgtcatgaaccatagggtacacatctgataagtgactcccatgaaagagtcatttgatccccaatgagatcacaacccacggattgagaacccactggtctaggggcagagtcagttaaagggtagatagatatcagatgggaagtgagcctgctgccatggagacgaacattggtaatgcctaacctaagccagcacgtggggtacagagctttgtgcaggggcacaatctgtaagccagacttactgtatggaagcgtaccgtagggctccttcaggcagtgacactgcacaggctccacccgagcttcctgggaactaaagggactttgatgctgaccgtttgtatttcttcttttagaattttgccatctgttaccttttgctatcttagttattttttagatttatcttacacatatgattgtattccttcatatatatatatatatatatatatatatatatatgaatatatatacgaaggaatatatatatatatatatatatatatatatatatatatatatatgcacacagtgtgtatatcatgtcctcaaaggccagaagagcatatcggattctctgggactgaagttacagatggttgcggacatccatatggaggctgggaactgatcctgggcctttgcaagagtaacacgtgctctgaaccacctagccatccctccagaaccactttttaaaattattattattgttgttgttattattattatctttccaattagtatatccatttctaggccttttcttttacaggactttatccaggctagccttgaactcactaggtagccaaaggaggtccttgaacttctgtacctcctgtctccactttctgagcgctgagggcatatatcaccaaatctaatttatacagtacttgggattgaaactagggtgtgtgtgtgtgtgtgtgtgtgtgtgtgtgtgtgtgtgtatatatattttcaggtttctattcctgcacaaactcagctacataaccatcataaatactatttttaaagtaggctgtgtgcagtatattattaacctttagtattaatgtttgttgtaagtatttgcctttttctagttaatttactcttaatcccccgagctttcccaaagcccagcgccccacaagctgcgttcctgtctgtgtgtattttaacgttatagtagacaggaagctcactgcatctaaaaggcagcagagaagagagtggccatactggcgtccccatctctcaccagtggagcnnnnnnnnnnnnnnnnnnnnnnnnnnnnnnnnnnnnnnnnnnnnnnnnnnnnnnnnnnnnnnnnnnnnnnnnnnnnnnnnnnnnnnnnnnnnnnnnnnnnnnnnnnnnnnnnnnnnnnnnnnnnnnnnnnnnnnnnnnnnnnnnnnnnnnnnnnnnnnnnnnnnnnnnnnnnnnnnnnnnnnnnnnnnnnnnnnngccagggctcccgtgctaaagacctgaagcccccagctctgcagcaaaggtagtttccctccactttccaagttcaccagactcctttctgcattgcagctgcagtgttctaggaatcggactccccggggtttcctcagtgggaccagggacaggagcagtcgcccatcctcagactggctgctcctgttcttccactatggttttgggaggcttctcgatttcatttcctctacagagtcacactcagactcctggaaggtagcaagggagagtggacatgggggtcacaagggaacctggtggggcctgagagaaaggatgacagctaagggactttaggaaaggaacagaagccgacatctgcactgctgtgatcaaacggctgtcatctctctgtccttaacagttagatagcttcctctacctcaccggatctcaaaaaggtagccatcctatgctgtggatgggacatttaagcttgggtgagccagtcccatccttttctgatgagcctcagatttatttatttatttatttatttatttatttatttatttatttatagaaagtatcaggaaattggtgctggccctttgactttgagtgctaaaagaggttgattcctaggcatcctagcctagatagttaaccctttgtgcctttcaggatgacattttcttctttactttcctctggtttgtgtgtgtgtgtgtgtgtgtgtgtgtgtgtgtgtgtgtgtgtatgcacacgtgtgcacgcgcatgcacgcctatgcatgcatatggtatatgtgtggagacaactagcaagagttggttttctccttccactgtgtgggtctagaggatcgacctgagatcctcaggcctggcgacaagaacctttaccccctgagccatctcactggcccctcctgaggtgttttgaagattctcttggctgctctttccagcctagcctcatcttcaccctttatcttaattctgttctggagtgtgtgcatctgatacgcgaggctggcatgtcctgttacagtcaccagaaaacattggttttcttcggtcactgaccaagcttctcactgcctggctctggaaggaagaattaagtcctgttttcagaatcatctgcttttgccttactgtgcaaaaagcttaccttggcagggaaccacacactgaacgctagcctaagcagccactgtggctttactaaatggtgattgtcaagtagaattgataaggtaggccaacaccaagtggaatcaagggctggatatttatttccattgtgttagtcttcctgactttccttatgcagctgtctaacaaccagagtggacacaatatttcctcccactagttttaaacatagatgctttttgggtttctgttaaaagttgttttatagatcaaaggaaaataaattgttaggtggatcactgttccctggcataggctagtcttcaattctgcaagtcaccaaggtgacgttgaattctgatctttaccctgccttcaggttctggcattacagctgtgtaccaccacatacaatgtttatgtagtgctgggtattgaacctggggtgctacgcacggcagtcaaacacaccattgtctgaactgcctctctagcctttcagactaaactttaaaactatagcaatcaggattctgtggttccctctgtactttgacagatgtgagccaatggggctgtagtgggaagagagagaaaaggttacatttgtggcacaggattgtaactaacaaataaggcgcctttgtcatcttaattggctcttcctggcagaagtttcatacagctgtttctctgggacactgacaactatttatggtaagcaatttttgtggattataacaagtttcaacagaaagttggatcatctcacttggaagggttcttcctgagctcagggcagatggaatcacagtcatcgcctgctctctgattttctgtttcttttttctttataaaatgttcaccattgaagctctgactcgagttctagcgtctcttgtgctagtcctcagttactgaagtgtgggttggtgtgtgttggggaaagggactggttgcagagtggatgggcgttggatgctggcagcccctactgcatcatgaagcagcagggctgtgtgctgatagccacccagttctttcctaaccgtttctgcagtttccagtgtctcctccagctccactctggagttgctcttgctttgatctggaacctgagccatctttcctttaaaatgaggcagtctggaaagagcagctcaaaaggcagacttcttttatacaataccaaacatcttcagcctccccaggatcagaaacctctcacctactgcaagaattatttatttatttatttatttattaaaagtgaaccgagttgaagttaacaagcttaactgtagcatgtgctacactttttgtacacatctccagctgttttctggacatacccataaaggagacatgttcctgggctgtggtttagcttcagcccttaatattgctctgtccttcctagttgaagggaacttacaaagaagcaaaacagctgttctgaagtacatctagagactgaaactccagaatctgttgatcatcccctccccccacccctttaccctcaaagacctttaaatagaagccgcttccttttacccattgaccccaagccctatctgatgtcttcagttgtggagcagagtggcagcttgcttctgaagtctaccacgaagggcttcaatgtttcatggaaatggcaacaaaataacctgatattaagagcccaccttgaagtctgccagttgtgcagttgcaagcttagtcagattttgaaatgttgtctccaaaattatataatccaggtggatatgaaaggtctaattgcattgtcttagtgcacgggctatgggtgtgtaagccctaccatctgacgtgcactttgcagagggaactaaaacacaatgtggattagttctgtgcaaaacggcttcatcttgtttatgcactgctttaggctcttggcagaacagatttaaaaaagagttaagccatacagagaagccccatccgtataaaagattcattattgaagccttaactcaagttttagcttctcttgacatactccttagacattcgttgaaatatgggtccagatacattggggagggaatctgctttagagtgttggggaaggagactggtttcaagtggataggcactggcatccctggtgctgctgaaaggaatggtggctcattctgtggtcatgtgacaggcagggtcttgtgctgtgttttagacattgcctagttcaggggatctttggtaggcgacagtctcagtaatggcagacagtttatgaggccttgagggactgggcttggggtgggtggatcggcttgagctgggtggtatctgaacaatcagcttgcttttagaacatagccctagtttggcttaggctttgcatgctcaggaaggcctcacagtagccagggtcagcaggaacttagtgattctgccatgcagacagaggaggtcttttaggatagtaatgctgtgcaaacatgaccatggctgcttgctttgtgtgtgtgtgtgagaaagaataacctttggactaaaaattagaacaaaaatgttcaggtatttagaatgatcctatctgaatacggaccctcagaaatcctctatttggaagtcattcacatggctatagtaacttcttgccttagaaacaataaccctgataaaattatttggtaatcaagaaggtaggggtgtagttcaattggtagaacacttagctagcacacatgaagtcctaggttccatccccagtaccacataaaccaggcatgatggtgcaggcctgtaatactagtgcctgagaggtgaaggcaggaggattagaagttcaaggtcatcctcagctacacaggaagttcaagaccagcctgagctatatgacactgcatctcagacaagaactaagtgatgaaagaaggcggggtgagttggtaggggtcctgtggggctaggacgcaacttgatagtaatgagttcttattgaaagtgacacagcgtctggaattgtggaatcggggaagactcagaggaatcttgtgataatcagagtgtgcagaccagtgaggtcctgatgttctttatgcctgcagacaggatgaataccagagatctgaaagtaatcctttttaatgtgcacgtgcgtgtgcacgcatgtgtgtgtgtgtgcatgcacatgtgtgtgtagattgatggcatgcaaagcttaagctttgactggtgacagatctttgtctagaaaaccgatacttttcttctctttaatgtagaagttttgggatccagcaagcttcagagacagtaaatgttcaccgagttcttcaaattcagtctcattatgtcaactcgtgggtgacatttcccccttgcatttaatatctgaggcacaaagtcttacgtattaaaatacatctaatgtcttgtttttgctatgacacacttcttacctacacaattaaatgggtcatgttctgaaatgtatgcacaggtctggagaggtgtaccatgtattgtatatcccaccttgtaggaagtttgctaaagtggaaaaagcactgtataggccacctgtagtgtacgctttatgagcagtagtcacatacgaggagctgtactcgggagaagagttataaatggtcattagccatgaataattaacttggaacttgaccgcacctgggaggttccagcccgtggtgataaccactattgtttaaggtgaacttgaacctgttatcccctgttgagtttccctttctcttatgtgtctgcatccatttttattgcctgttgacctagacatttgtccttaaaaacccaccttgcagagctctacagtttaccaagggaaaataatcagacaggaaggccgcttgtaaaatctcgatcaagatttcaagagaatgattgtcttagagcttttgttcagggtgattttacacgggccacggatgtgctctacacggctctaagggttgcaagctgttctgacaccgtttcacagtgataaactcagccgttgagcagagttcttgggagtatctgctgttcaccaacactaagagcgaggcagagactaaactggccgtgctcccaattttgagagagagagttgagctcaattaaaagttgaatccaatttaaagctggatcaaaggaaggatttgggtgacaaggatgttggggcccggtgggcatttcagcttccacgtgtggaggtgccaagcactgggcattaagaggagggccggagtgtgaatgttaggagctgagatgatgtagaaatagtgtccgtgtagaaaagtgtagaagcaggaagggaacacatgttaggatgccattgtccaccctaaacaatgttgttcaaaacgactcactcagtcaatcaacccatccatccatcagtcaatcaaccaaccaaccaaccaaccagctgcctgcttgcctgcttgccttccttccttccttccttccttccttccttccttccttcctttcttcctttcttccccttgtcctcttctttatcctttctttggtgttaaacgataccctttaccactgagctacacacctggcccaacacccctctatctttttatgttgatggtgatgtttagttttgagattgtagtttaattacatttctcccttcccttccctccctctcaaaactgccatatacctctcctcaccccccttcacattcatggcctctctttacattaaatattattgcatgcatgtgtttgtatagatatctatagctctaactataagctggtgagtgcatataatgttacttgtatgcatactttcagggctgtttggctacgagcaatcagtggtgtgctcttggttagggagggccactctcccgttcccagctctattcagctctccgtggctctttgggtaaggctaagacctaatgggctttttacacccccccccccagttcgtcatgtttgttgaatactctcaatcttaaaaagtttgttagttttggttcaccagagtcaagaatattcatgtctaatacattaatatatcagatatgttaatatagtaaataaactagatatgttaacaaatgaaaccatgggagatactgttttcataaaagtatccctgtttacctatttggccacctctgcacactgtaggaagatgtcgaaagtagcttttaccctatattgattgctatccttctgtttgctgtcattagaggtgactttctgtctatttatttatttatttatttatttttgcgctcgtctttctgctctgtgttgtcactccttgtaagtattttaatctttaacaatataaacatgggacgatgctgaaagataattttcattattgggaatagcgaagatgtttttccctatccctttttagtgtttgtgtctgttgcacgcacatatgtgcatgcgtgtgtgcctgtggaggtcagaggtcaatgcccggtgtctttctctgttgctctccacctagagtttttgaaacagggtctcttactgaacctgaagctcatcacatggtctccactggctgatcagtgagtcctcagtacccactcacctgtctctcagcaatgaggttcaaacatagtatgcttatttttcactggcttttacgtatgtgtatgtgctggggattccagctcaggtcttcatgctggaaatcgctttacccacggagccatctccctagcccatctttttttttttttttcatactcttaataatttttaaaaattagaggtgaggaagggagggagtgaatattatgttttccatcctgaatactggctacatctgttgtacacccagccctctgaagtgaccgacagatgcagggggggctttggaggcagttctggcttctcacctcttccctgccaggcttgtcctcagcatctcatgtctgtaacttctcagccattccaggaccacacctctcctcgccatcaactgtagaatgctgtaacttccttctagcagggaaagtcgcttgtttgtattgcttttgaagcagtgcccaaagggaaggagtttctggcttatgccactgcttgtgcaagagcccattagaggctcttgctgtgtctgtgagtccgacaatcaggtgctaacaaatcactcctgtccgcatgagggcagcctggacagaggaagacggatgtgagaggctgggtctgaagagtggacctgactcagtgaagaactaatatggaggtgactgagggagagggaggtgcatgtccagggtgacacctaggttccgtcaggagcagcagggcggatggaactgctgtccaccgagataagggacagccaagaagagcttgctgtttgcacatctgagtcatatctgaccaggtgaccttgagtttcgtttcaaaatcaatagccttataatatccggcatggcgtgccttgagcaggtgtttcagggtgggtttcttggggccctataatgccccgattttattttctttctgttaatttctcaatggcattttctgggcagaggcacctttggtatttcttagggagtgctgtgactcaggaaaggctaagagccactgactaattatgtccccttgcagaaaccgctcaataaatacttgtcttgggctctcattgccgaggaacaacactgatggatggaaatttcctagtcagcctcctcttccctgatgctgcttctctggggcatcactcatcggggtgtcactcatcaccacggcagtctctgaggggctttgtacaattaccatgtacacagtagctttaatattttagtattttttcacatttatttgattaacgtgtgtgtgtgtgtgtgtgtgtgtgtctgtcggtcagaggacagcttctggaagtcagttcttctactgtgtggtttccagggatcagagcatcaggctcgttggcaagtaggtgtctttaagctgctgagccatctcactggcccaaagcttaatctttcttacagagatggtcttagtatgtcaccacaccacttagcttacccgcgagctcagtgttcatgtccccatctcagacgagggaaccaaggctgagtaactgacaactaccaagtgtcagaacttggccttgtttagaccaaagtcatactgttttcctggaggataatagttctactggttgggacgggactgagttccttctttaaaaatcaaacaaataaaaacagcaaacaaacaaacggagctgtccctgtaaaggagccaagtatgagtggccgtgacccaaatgagttccaaatggagcacttaggttccttgaaattccatgttctaacctggtaacttctgttcatttgcttggttggcttttgtgttttctagacagggtttctctgtgtagccgtggctgtcctgaaactcactctgtagaccaggctggcctcaaactcaagagatctgcccacctctaccttctgagtgctgggattaaaggtgtgcgttcccagtgccctgttagcctgttaaatttttatgacattttaatagtaacagaatgaagaaagtcataaatcaagacctttcgaacacattagtggggacgctgggtaggcagggtgcatccccgtgggaaagctctgcttcgtgcctccgatgttctctgtgcactcttagcctttggttggcagaggtcagtggtctgctaaggcaatagactccaaaggtttcacctgataatcacaaggatgttaggtcaggcacagagttgggcaatggctgttaatggggttaaaaaaggtaacctgagataaattgcaattagtctgtgtacctgcatagaagttctgaccaaccagtcagccttggcaaggcccagcttcctttcaggaacttcaattcccaagtcataactctgctttatacccaataggcacggtggcacacccctgtaatcctagcagtacttgggaggcagtgggcagaggatctgaagtccaaggtcttctgctatacagtaagttcgaggccagcctgggctacatgagtccccctccccagcccagccctaagaaagtgaagaagaaagaaacaaagagcggcatagtgcagtgtgctccagcctggagtatgaacaggcctctcagatgcctggctaagagacctgctctgtctctcagttcatgctgtaaatttaattcctttctgcctcagagtggatgcatttccctaggagcccttatgcctcatcttgctttgaaaataataaagctacacggaatttcagaatgcttaaacccagctcacagatttgagattgctatccttgggagcatcttcaccgcccacaccagagttctcagactttcccatctcgctctgtgttctgtgtgtgtaagttgtgtggtcgaattagaacttcttgttaggaagccgggtctgaaagtggtcattcatgcctggcctgtgtgtgtgtgtgtgaccgatgggcagtcatctccgtttcctcctgagtctgctctaatgattttcagagcagtgttgatgtgtgccatctctcacctaatgaactttatgaggaagcccatgcagtctcaggttatccagggacttaatgataaatgctaggaaagtaactgtacactggctttgtgtgagtcctacaaagctgccccccggcttgtgtctggtgtggggtggggttgtgtgtgttgggtgcccctgcacatatacacacattcatatggaggccagagaccaacctaggatgttgttctaggatgggtgttagacatccaacttatgccctcacattcacgaggcaggcacttggcttactgagccatctccctagccctatgtgcactttatttccaatacttccccccctcccccaattctggggaccgacctcagggacttgctcttgctaggcaaagcacttctgtcaccgagccacattcccagcccaaagcactcattctcaacagccaagcttagtaggcacatcattttgtatcccccatgaccagaagtctactttgacttggacaggcactaggcatgtatgctgtgcatgcacatacatgcaggaaaactactcatacatataaaataaaaaattaatgaatctaaaaaataaaaatcaaggccttacatgaaacaagcattaaacaactaaaaccaaacgaggcgcctgtgggaggagaggtaaagcctccggttagtagggtgctggcggctgggttcctgccgcagatcctgctgtcgcaatcccatcctcttctgcagcagcagtgtgcatgtgtagatggggaaagccaggtcctcctgaaagatctgctgggggctggtgagatggctaacggccaaaggtgtccatagccaaatcctaacaaccaaggctgatgacctaagtttgatgctaggacccacatcgtcctttgatattcagacatgcaatgtggcgtgtgtgtgtgtgtgtgtgtgtgtgtgtgtgtgtgtgtgtgtgcacagacatcaaatgtaataaaagccactaaagaatcagctcaagaggaactgcaatggtctgtgggtgaaacttaggaacacaccctattcttctaaatgtttacatagtttgaagtcctgaaatcaaatatggaattcagggccttgcccatgctaggcaaactccttatttgtgaatacacatgcagtccttgaagcagacttaggcaaggcactgggaatatcactgtagcggctgggtagcaatcgcccagaagaggacaccattcccagctcttcctggactgctagtcgctcctgtgtatttgcagtgccttgcatccctccattctggaacagaaggcatggggatggtatctggaagtgggttgaagcacagcttgaggttaaggtcatctactgaatgaatcacctgcctatggataatggcgttgtaagatgaccaggatttcgccagcacactagccaaggaaccacacagttaaaaattctaggtccccctcaaatagatagtgggcaagaacttttaacatggtgcttagctgagactgtgtcctggatttgcttatgtgctcctgatgactacttcctgagttagagcttggcgatttccctgacaaaatgttacacactcatcagtggaccgtgatgtgttgaagttgccatcctagaaagcactcacccacggggaacagtaaactgccttcttcctataattggagagtcactctgacttcgtgcagactgtcttctaacaacaaggatctcatgtctgtggccgtggacacattgcaaacatttctacctttcatgtgaagactggctgtgaagaaacaaggtgatgacctgagttcagtcctgggaccctcattgtgagaggagagagtgaacttcctgtgtggcataattatatttaatatattacatgttatatattatataatgtaatatataacatatgtagcatatatatatatatattaaataatgtgtttccttatggctttttcaaatacactcagtctcacttatctcttattccctcctgtctcccaccgtgtttccctccactccactttccccctttccgctatcatagcacctatattctactattctactctccaagctccccacagtctacatcactggcttctataattacttaggctatatagtaaactctaaacgcactcttacccattgagccatctccctagtcatgtctgttttggagatatagtctcactctgctgctcaggctggtcttgagtgtgtgcctacctgcctgcctcggcttcccaaatagtaggagcgcagacataagccaccacatctagctgagaccttcatttaaaaaaaggagacaagttcaagttccagctggtttctgcctgtcccaatgaggctgaaatcactcctgcagccggcacagctgaaaaagtagccagccctaatccagaccctatcaggtggacccatctttcggatacaaagctgttctcttgcaacattttgccaagaacctggcttccatctcctggattttattatcctggcttgatggagagagaagccagccatcnnnnnnnnnnnnnnnnnnnnncccccccccccgcgccctgccctgggctgcaaatactttgttcctgtgggtagctctgagaggagggagccctttcctggagcctccatgtgtccgcagtttctttaggctattgatttccagggttactgaactcatacctcccacagaaaataaatatgtggctgcccaccaccagcctgctgcagtcctccctctgccccacccccagcctgctgcagtcctccctctgcctctcacagaggctctgattgagtgttacgtgtctcctttggctgcctccacggcctcttatttttagggccttcgttaatgtctactactcgtgaaacatgaaaacggagccgtagcttctggaattggaaacttgaggttttgaggccactgtgctcttatcgtgtgggtccatcatcttctttagttacagaggttaaaaaaaaaaaaaaaccaaacaactccaccccaggggcctgtcaatgggcaggtagaggggtacagggatcagagcttggggtgtgctctgtaggctgtgaaagaagatcttgtaactaaagctcgggccagtttcgcagggctatggcctttcaggtgctggcaggagtctccttacagctcagccttgatacattgtgacagctctacttatttattttcttttctctgtcctttggggacttctgatcccatgattcaggaggcttggggaaagtctggattttcagtggacccccatcatttctgatctaagaggaagggctccaaggatcatcaccacatgttggcatgcctagcgggctcagcccatcccagggcttacagagccagggatctgtgccccctcaatagagagtggtgagcctgtgggagatggaaaggttgaacgaatagacagcaggtggttctttgtttctgaagagaaacagaaacttagatgaagccttaacatccctggtttctcactggggaggctgaacacttgtggtcctggtcagttggttgaaagatttagagttaaatgaggctacatcagctcctagacctgaggcttgttctggttgctctctatcaagtgtgtggaatgtctctagccagcaacattgtgtgtgtatccatctcttctcacttgttaaagtgtagctttggtggaaggaactcggagcccaccgggttgtcatagcatctagaagccccaccccccatgacgtggagataaagctggtacttggtggactcaggtaggtagacagctgtttgaatcagtacagccaagtctcttggccatgaaaagtgcagagtgtcagcgcagttcttatttttattgcctccctcccccctccaccaggctaggggtgcatgccagctaacagggtagaggtggcagttgcttgaagctgtgtattccctaaatgccaactgagttcaaccggccctgcttctgagcagcacatgtattgtccgtgtgttggtgcttcaagcccctaagatggccccttagtgagaggattagaaacaaaagcctctgcggaaggttagattttatgggccatctctttgggcagggagacagtatagacgttcccctgagtccacctctgcccccatacatgtggttgggtttagaaggggccatggggaccacagcacatactttgaaactgtagatacatgtgctttagtataggatgctagagaggtgtgtgttagaagcttttctactagggctctagactgttagaagctagcttttaaatgattaaacttatgaccatgtcttgttaattgcaagtaataaatgcctacttaagccagcataatcaggattcacttaaggatacccagggtggtttatgggaacaagagcagggcctggtgccagactgtgggggtgtctcaaggcacaaagagaggacagagccctgctggccccagggcctgccagcttctgcctctctgtcagcctttttcttctctctggttgtacttggccttttctctctacttaaggtctaaagcggcaataccagctctctcctagctggatgggaagttctagtactaaaagacacaagtctcagttcaggttcctgagagagacttcaaggatgagaccactaccctgctccaatggatgcaacccacacaggaggagccagaggaccgaacgaagcccaggggaatcctattgtcggatgaatgaacaccctgctactacctaactttgttctcattattttcctgtttctttctgggaagctccgggcgtcttccggaagctcatctcgagggactcatctgtgtgtatgaactaaactctttagtgaggtgtgggctctgcagatggcccaagaggtctctgccgcggggtgtctagacagtaagtctgccaaagtagcggaactcccatggacagggccagagcaagtggaatgcaggactaggaacatctggctcatgttcttcttccagctgtgctgtgaagggaaacgggagcgagtgagccaatgaggtgtgctctaggccatcctctcacagatgagacagttacaccaagcccctcatacttcttacatgcagttcttcagggatgggttcgcagtatcttctcagatattttggcctgtgaatcgttgccccctaccttgtttgcagtgcagagagcagctgggagctttaaccgcataaacgagctaagcccctctggttcaaggcggatgccctacatcgcgcaactgaaatcctcgtctcgtacatcagacctctctgcgccttttactgtggcttaagtgttggatggttcgctgttgatcatgcttttcattttaattttcccgattgctcccagcgatcttccctttaggcccactgccaagctcagtgacaggtatctcggcccataacccaaccagcataatcctacaatggggccatttggttcagaaaaggggcttatgttccgtaaatgctgaggaaatcccctacagaaactggtctggttagctttgtattgctgggataaataaccgtcacatccaaaggcagtttggcgaggaaaaggtttgtttcagttacaggttatagttcatcactgagaggggagtcagggcagaaactcaaggcaaagactgaagcagaggccacagaggagtgatgcttaccagcttactagttccctgtgatgcttactagttccctgtgatgcttactagttagttccctgtgatgcttactagcttgttccctgtggcttcccagggcccctgccttgggatgggaccacccacaagagggtgggcctcctacaccaattagaaatcaagaaaatatctcacagacaagactgcaggacaatctgatctagacagtccctcagttgaacttccctcttcctaggagaccctggaccgtatcaagttgagagttgaagccttgacgtaaacagagcaaggaaagtatttggaaatgaaggggttaaggtggcatgtagtccacagttcactgtgagctttgtatcactggccgaccacttccgtagtcttgaaacaggtggtagcatctcacttcagccctctaactgtcctcagtggctgcgacctctctgtatgtctgtctgtccagctaaactgatgttgccttcacagcttctgtgattggcttttttacgccgaatcagggagctgtgacgttcaataccgatgggctctttgtaactgagctaggaaggctcaccgatgaacatgcaaaatccatcttgagcgattcttctatctcagcatgcaatccctaaagtgaacttgtagcatccatttttccagagagttctgggtcagggctatgggcacgagcacttgttctcaggtcctgtgcctacgttactcagtgtgcctctctggagttcctttttgtctgcctattggtctgctgcttcagtcaacccatcccaatatcaggactcaaggttgagaaattcagttgtcttctgttataacttacaatcctacctcatgggctaaaaaatgaattctgtaaactaaacttcctacgtctgtccaggtcctccgttgctatatccacgctgcctagtgtggcaggtccttcataaaggttattgcctttgtccatgagtggatagaggagtggtacatgttctgatctggctttgcagggtgcagaatctgttttccagccaagttaaggctggcagctgccgtttggagtccactttgaatacagaagattgagattatacatcgcaaactcaggtcttagaacggatggctccggtctcttcctctccaggacagtggctcacaggagctttttattctctggcatagttgccctcaggactgcccacttgcctaatcagcttaagctcttccctcttagacctctaatcccatttccccagccgagaggcaggaggatggtagtaaccttgtcccgcagctactaaaagatgctatctccctgcgcacacacaaaaaaagtacttatctttttccctgcaaaaggatgattaagaagaaatttaatattcgtgtattccttttatctttctgtgatatttcttcatgtcttgtagtgtagtcaggagagggacaggcttttttctttttttgttttttaatcgtagccattgctgattctattctgctgattttcagcatcctaaccacaggaggcttgctctcccatgcttgctcgcatcttaccagcacattatggaccctggttgcttagaaggggagacaacagtaaaaatgaagccaccttggatatgtgctattttccagataaacaaccagattagcttgagatggtcgcgtttcaggtatttgctcaccacggccttgtctggatgcctgcaggtcaaactttgctattggttttatttctctgtaatttacaagtacagaaggggctgcaccaaggaggagcccatcacagtccacttataaacaggcagccagtcctgatgctttcgtgtcctgctgtatgtgctaatgaaggcccaagaagtgctaatgaaagggaggaagatttaaccagaaccttcccaggctcctcatagctgcctgtccagccataaggggcttccctatgcccccccacacaccccgcttttgtggctgggtttgaatgtctgctggtagatgtctgtgccttagagagtgcaggtgcacctgtcattcttggaaattcctgtgtgtctgaggcaccaggtcccagctcacagatcccgtcatcattttgtcctctgtttctgaagaccagtcctaaacaatgcatcttaaaaattgaagaggagttattgcttgttaaaacaaaacaaaacaaaacaaaacaaaacaaaggcccaaatgctaaaagccttctttatgtctggttgcagatgaaaagattcaagcacaaccagccctaggtattgatgaggcaaatggatgaatatggaaacgcgctcgtgaagatgcaccctgtcattcacgagagcaaattatattcccagtataattacagctattaaaaaaaaaagccttatgtgcaggaagaacctgaaagcaatgaaatgaaggaagactttttatttttgttttctttaattttctgagctgttcaatatatgtgttttttaaaagcaaaatgatctcacaggcatttattcttgcccgataataacataaggatcgtcaaaacaatatgaatgaatgcttccgaaatatattctcagcagaagacaccttaaagatacaagctgtattgtcttctcagcttcctatttcctgaccgattttacttagaaacacttcgtagtagggtgctatctcctctcagcgtgacctgatccagttgacttttggctttgttttagaatgattcttttctgcatcatctaaggtgaggttcatttgttcatcaaaaccaacaatctaaccctctgtccacgtattcacagagccatgcctgaatctgagatctactctgcaagtgtctgaagatgaggttggtaggctgtgcagtcaccttctgcatctcctaactctggtcagggacaccgtggtggaccctcacaaagaccacatgcatctacaccatcacatatttttaatcttattatttttttttagcagaattgactttctttgtataataaacactatatagttgaacatttaaaagtgacggagacttgggaagctaagagtggttgccatgacagtaaaaagttatgcttaaaatacaaccttttggggtctagagttactggcttttgtgaagattttcttggagcagggttgccaaaaggtgatagaattttcaactaacacttctcctttctgttctcagcttttaagtgtcaaccctaaaccagaagtgcagaaactgatggtagggtgtggggtggggtctgaagggttctgggatgggctaaggaaacttggaggagggcccagaacaataatgaactaagttactgggtctccagacagtccttgctgtctttgtcactcatgtcatcttttagagatctgtagatgcaaagctaacctagaatatttaacaaactcgccccataataacggcaatcagggatgtaaacaaaccacaggagataacaatggttgatgtaattttgtatttccttttgaatgacttacaatgatcttcttggataagtagattctgaattcttttctctcttttaccttttttttttttttttttttttttttttttgctattgttgttgtttgtttctgagggaggatgggaggatttcatgtatccccatctggatttgaactcattaggtaaccttgaacttatgatcatcctgcccctgcctctctgcctcccaaatgctgaggttacagagatagatgcctcactgcacttggttcttgacagtgcaggagggctggagtgatggctcagccattgagggctaggcttatcagcacaaagacaggggtgtgcaatcactatgggttgtggagatggagcaggagtgattactgcccctgctgcttacaagctgtaaacctgtgaaagtcaaacttttctcatctataaatggggaatactagaaccaagagtagctctcaccatggcttgtggttactgaatgagagatgatgagcatgaaggcttcttgtatgttatatgttgtggcgcttggtggacgatagttattatgagggactgtgaaatggagaagtcttatggaaaaccccactgggcacttagccatggaccatggtatgtcatgttctagcttggaagagaaattcgtctcaagtctgtgagaggacagcagagtgctaggagcccagctgcctggtaagccgttctttctgctgaaccccaaagcagagagaatcgtaacaggcattatagagcctaacgacattaattagaattgcagagctctaaactaattatcttttgttttggtctcctttgtttaatactttacaatttgtaatggatctcttgagcattttgaaagaagtagagactgaggagagtgtatttgtgggtatcaagcgtgggtctgttttcaggaatgtgcactcagagctttacggctagcaggcgccttagtgtcggctggggattgggtgtgttgaggttttccctgaacaaggaatatttaaataaatattttaaaaaatacatttttatacacacaagatatatgcacaaaatgtacacacacacacacacctgtcttattctttgccatacagttcattgcactgtggtttttgtttgttcatctattcatcaacataaaaaccactaacagtccctttaatttatcttttaaatttagtatttttatgtccagaatgatgctggcatctgcacctgctctgatagagcctctccatggtttatgtgttcagcgattacaatcccagtagccccacccacagagaaagcgtctcacatgtcccatcgatggcacactctcctgcttagtttccacaagtgcatattgcattgtgtcaatctccgagttgtaaagcaatctgatagactataaggggagatgaccgttggacgtctcacacacaaacattccgagaaggaagtgtttcgccttggagtatgaggaaacaagtctaaaatgtgtcgtgagttcactacgatgtcttataaacacagtcctcgttttcctctggctgtttttttttttttgtcttgttttcatnnnnnnnnnnnnnnnnnnnngctgtttttttttttttgtcttgttttctcttagctgaactcaccggtctcagttagggttctgttgctgtgaacagacaccatgaccaaggcaactcttataaagccaaacattcagttggggctcacttatagtttcagaggttcagtctattatcatggtaggaagcatggcagcatgcaggcaggcattgtgctggagtagctgaaagttctacatcttgatctgaaggcagctagaaggtgaatatgtcttccgcagacagccaagaggaggctcttttcccacaggggtggagcttgagcatagaaacctcaaagcctatctgcacagtgacagacttcttccaacaaggccatgcctactccaacaaggccacacctcctaatagtgtcactccctatggccaagcattcaaacacgtgagtctgggggcgggggggggggtgcaaacctattcaaatcaccttaaaaccaaaatggaaatccagtgtaagaactttattcttttaaaaactcgtcattcccagacaaacctgttcagcgccagtaaatttaaaaatgtgaatttggtcacttgaattttttttaacatttatatagttatatagtttgtatgcacatggcatgaacatggcactcacatgcatagcactggcctgtgtggagaccagaggacaatgtgtgagcgttggtattcttctttaccacgcacattctgggaactgaacacaggccgtcaggcttgctagtaaagcacctttaccaggcgggccatttcaccagttcctaaaaactcgagtttagatgagaagcaagttaagattgttctcaacgatatatttccagaaagttcctgagtggcagcaactttcatcgtgaacagcccacggcttgctttactttaattctctgaggacttagttcctcagaacgagaaggttataaatgagctcgaaagcctccctgctgcaagttccttttcaaaatgcctcactgctgggtgtggtagcgcatgtctggaatcctagcacttagaagctagaggattcggtgcagtttgaggccagccaaccaggactatgtagtgaggctatctgaaacaaaccaacaaaccaaaccaaatcaaaagttaaataagcccaaaagttattacagtttcctattcttcagccctggctttgacacgcagaaagctggttcctttgactcagcacatcacatcctataatggctgaacctttcaggagatggggaatcgaccagatgaatgcctcctctttctagaagattctagtctggctacatgggtctgacactctggagctcactgtcaagtacagagactcagaggtcctatttggttgtacacctaaagtgggcaagttaaaggctacggacaaacaactcagaaagctgtgtcctcaaatgcaaataactcactctagcacagcaccagaaataattcagatttttaaagacttcacttgaatagttgggaatagaaaacaattatagaaatatttatagtaggcacaaactcgcacataaaatcaaagaactttgagcaagcttgttgctgttactctttaaacaactggcataaataattgtttcttgtacttctgaccatttaacgctaaccaagtcatgcctagtgtataaatgtcttaaaactcatttttttttaaatccattacatttaattctggactaaaaataatagtagtgatgttcaggacatctttgaatataataagatcataaggggctatttgtagggatatgtacatgggaaatttgcatatcactttcaaacagcaggaaaactgttatttcaatgtggtagccctagtcccgtacaactggacatggtcactaagaccgctaagtgtgtcctgggaatcagagaggaaagctgccttgccgaaccattcagctagccacgagattctgtcaggatgggtgaggtctcagagtgggtttggaagtgatgtcaagaagcaagtcacttaatggctggcccctttcagttctcagggctgagtacagaaggacctttgagcggatttctgtctgtaggatttggtagctctatgtgaaagtcctcatcatgttagtgtggggattgccccagtagcttctgatgtatgtatgacagccatggccctcttctaggacgctctccttgttctctgccctgatcagaggtttcttggggtctggaattggaagataccctccctcagacagtgagaagttctgtgtttgtttaggatcactgggagtgggggtgcagagactgcgggtgctccacttaagctgtaggggagctgagggcaggcaggcatgcaggaggaagggaggcatgggccatactttctatgtctttcttgcatatatatcgtggaaagtgttaaggtccacaagctcacactcgtcacctgcactggagaacacagcttcttggctcctctaggaccaggtcaaatcccggtgtcctactagttgatctggcgagggatgggcttcagaggagcttaggagggagggggcccatgaagagggagatttaaggagtgagttgagaggagtgggggttttatcactgctctatccccctgccctcagttgaaggacgtaaagatacagtcatcgtcttctctgagatggggtatgccagcctagcctcaggctcccgggcctcctgcttctgtctaggattaccatgtgtgccaaggttgcccctgtctgtctctttgtttagctttccatttcattggggatgaggattaaaagcaggagagaggtgagctgaaggctcccattgatctgtgaccatgttggtttcattgaattgttcccttgtaaatgctgcctatcctgttctggacagtagagaggaagagtgttccctaaaaggccatcgagcctgagtggacttgtccttgtgttagctggcagtagacgtgaacaccaccaaacgtctgcatgccgtttggcatcaagcctcacctagccttgcttcctcagtcactggactggctcctccctctgctgcttcacagaggtgggtgctgcggtcttctctccccctcttcagtcttcctcactgtgcttttcaatagttgcctttcaatgatggcatcctaaagtcccctgtctcctctttgcctctcccagggcaagtttattggacacctgctgtgggactcaaagagggtggttttcccctgacttgcgggtgtctaagttctccctggctgctgacctctctcatgtacacacatacttttgttgcccctctcatctctgcatcccaccccatgtgtcttctgcaaagtgtctaacaatttgaggccaactggtgtggttttcctttgacatgaactgctcagggaagactttcagataatgttttctgcttgcgtatcactttgtacttgaagaacttgccatctgattacaccaggcttctgaacagctttagttatgtgtgttaagaaaaccaatagaacccaaatattagaagaaaagaaaggtagcatttgtctttttacatcttgatattccttgaatagattcttcctaatgcatagaattctttgagtcttttttttttttttttggtaggggaaaggtcaatcagagttaagaggacagattttttttttttaggagagcctattgcaagagggttttagtatttttttgagcaagaagttcaaaatacttggcattatgtatgtctggaggagatcagagacggaaaaagaacaaagcatgagtcttgtcggcttcctgaaggttcctgcagaagaagcagagaaaggagagggtatgaatggctgacccaagccccagaggttcctttaacacccacttcatcacagggaactgcgcatcttataaacttctctcatgtgcacacacactgtgctcttagcatactgttctcttcctgatgactttattctgcccttattgtctagttatttgtgaatggtcatatcttcttctaccatctgattgactctctctgtgtgtggtatatgcatgtgtgtgagggggtcgggggggagttctcacctatgaggatgcctatgcctatggaggctgaggtcaattaggatacctttctctatcattgtgcacctttttttttttttttttttgagactgtctttcattgcatattggcctctcatcccaacattttggctggattggacagccagcaggcccccaggatcatttggcctttgacttcttctggctctgtggttataggtacatgtcacacacctggcttttcacacaggcgttgttgatctgaactcacatccttatgcatgtacaatgtgactctgcactgagccatcttccaagcctcttgattagctctttgcatatgctatagtttctgggataaattctgtattaccctaagtgctgaaaggaagaccctcctgataacatgactaattttattcagtgtacttgaaccaatcaaacaggcttataaatgtttaatactctctgctcatcataacttctcatttaagcagaggtataaaatgcacaccgaagccttccatacatgatttattcagcatttaatgctacctgaactgtggcttttattgtcactgagaactgagtgttgacagaaatacagcattgagtttcttctcgttgtttgcaaagtagctaactgtcatctttcctgagtggccagaacaatacgaatgggaatccttacgttattaatttcatgtccgtatcatgaccaagattcccgtgcttttgaagtctgctttattcttaagattttagtaactgtaagtctgccactgaacccatgctctcaggtgtcttctcagtggaaaactcctgtgtctgtgtgtggcctctgaggtcactttcatattcatggccctccagatgtctgtgcagaccatcttttcacgtgcattattcagaatggaacctataggtttttcatggaaaaagttccatctgatgccagaaatttatcagcatttcaataaattcaaacacagcttgctactggtggaaataggcattaaaaggaaaacttaattactcttccctccctctccccctccctccttcctttcacgccagtctcccttccttcctctctttcctcttccctccccccgtttttttctcccctgtgatggtttgggtgagaatggcccccgtcggctcacatgtcgaagtgcttgatccctggttggcagaggcctttgagaagggttaggagtgtagccttgatgggtgaggtgtgtcaccagggtcaggctttgagctttcagaaacccatggttgtgtctcaagatgtaagccttcagctgctgctccagtgtcatgcctgcctgcctgcctgccctgtgccacgttggacatggactgtaaccctctgaagctgtaaccctaaataaactctttgttctctgtaagttatcatgctgtcctatcacagcgatctaaaaggaaagaaggcacccctctttctttcctttccttacttcccctctgtcctcttcttggttttgacaaagtaggctacatacccagaactatatctgcaagcctcttcatagggatatgctgctgacttgctcactaaaaattgatggccagggttgcaagtccagtactgtacattaaagtacttgtctagagtgtgcccaaaccaaaacaccactcagcacttgcctctggatttgtctttcagactctggtactgaaagttagaaacctgtttggccttgctctcctctccttcccctgacctctgttatcttgagacgtgtccccagtatgtagccctgactagcctgggactagctatgaagactagcccagactagaacttacagggattgtcctgcctctgcttcctgagagctgggattacagatgtgcacctctacatctggctctaggccccacacccctttttctgtgcagtactgaggctcaagcttaggtcctggtgagcacgaggcaacaaacactggccccaaacccagttctctctcctgtagatccataaatgctgaactcagaagagggtcaaactgaccctttcactgagttgagcacacgcacgaattataggaagaagtttaaagttgaataatgaccaggagtctgaaaggctgagatgaggaggagaaagagcagactccgcagcctcactcgcaggcccactgtactttgggtggaacaatgaactggccagagttagcctgccctgttggtgattatcttgaatagagaggatgagctctttcatgtgtcctttgtagaaagtaaaattgtcattgattccaataatttaatatgaaaaacataagatacctagcaattacaaagtcagtctttaaaatagaactttatctccaacaaaattttaaattattccctacgtcattaaataatttgagagtacatttggggttttttattccgggttggtctttgtggaaccatcattttggtgtcagagtgatctgctcagaataccctcttcccttcctctcctgttttcaggtaattatgttgtcaggaccgaggtaaaacctttgaaaacattgctttcaaggtgccagaggcagagccttcataaatggctgcaatttgcaaacagtttgggagtttgataagtttttaacagaccatgttgagttcatagaatctgatttctttgaaggaaacaaaaagagaacaagaaagaaaaaaacctgctgttcagtccctctgcagaagagcctgggctcccggccaacagtttcctgcctgggaacctgtgctgagctttaccctgggcacagggtggataaaagacttcataaaagctcccagggcaggtgaaaaatcagggtctggaagccagaggctgttaactggggatacaaggcagagaccagtacctggtgaaagctacagcaatctacaacaatagttaaagcttggagccgtggaaatctgagccttaactgtttcgtgtgtgtgtgtgtgtgtgtgtgtgtgtgtgtgttattagcttttgaaccttagtcctttgcaagagcaaccagtgtgctcttgggtaccaagccatctctccaaccccattttgtgtgaactgaccaacaagcctcaggaatccccctgcctctacttccccggcactaaggttacaagtgtgcattgcaatattggtcttttccccaagggtgctgggaggctggagagatggctcagtggttaagagtgtgtgagggggtcgtaatttaggtccccattcttacgtaacaaacaccttaccaactgaaccatctcccccgtcccttctctgaatttaccgtaagattctaaaagacatccccacaagaaaatgggatgaagtagttctataagctctgcttcttttctggccccttttatccttcagagtgagtgactgattagattaagtgagaacagccaggctagaggcagcacagtgagtacctggtctcctaagacctcatctaaatctggattatgtcctgctcacctccaggcacggcacacgtacgttttcatcattcaacttcagtagatgctttctttgctaaatatgggacagagctgattacaggatagaactcacaagcctattggtgctacacatgccaaaggccccgtcggagggtttctattgctgtgatgaaacatcacgaccaaaagcaaactcagatttctctaccgcagttcatcattgaaggcgattagggcaggaacatggaggcaggagccagacagaagccttgaaagagtgctgcttgttgtccataactttctaggtctacttttttttttatagtatccaggacaaccagcctagaggtggtaccacccacaatgggctggggcctcccacattattaattaaggagatgccctatagtcttgcctgtagctctgtcacaacgaggttccctcccctcagatgactatctcttgtgtcaagttgacataaaactagccagcttatgtatagtaggtattcagtaagttctgtccctgctaatcttaaataagcacttaaaggggtcaccagcagtgagcaccctgtgtttacagggcactttgggactctgaacacagaatcatggcactgtcctgagaggaactcagcaggctgggcagttggttagtaaaataaactcagagatccaaccagtgacattgggccagtggcttctgtcagaacttgccgagggtgatgaaactcccaaacactgtccattcttgcttcctgcagaagtctgtgcattttgagttaaattactgaagcccatttggctatttcaaaccaccaggctcagttgttgactctttccataactttggggccagagtgcatctcttaacttacacatatttcatgtttcttgctcttggtgcaaaggtctttaaatggggagagatgcctacaaacacagtatgagaaaatgttaacgattttcataagttcattttgcataaaacttgaggtttcattttgaggttcttggtttagttggccttagaaaatacgtaggcggttggaggtctgactgagtcttgatctccagcctaccccagaaaaaggtatttagcacctctagattcggtttctcgatgtgatagatgacggcagttttgactccatgattcttgagctctttcttcccagacatcctgttttagtgggttctttttactctcaactggcatgttcttcccaaagagccgaggagagactgctcatggctgaggaaagccatgttatccgtaattcacatgtgtgtgaattgtgaatcaattctactctgaagtcccactgagcaaggatgaggtgagaccattaggtatggggttaggtagggtctgccagtctgatgcagctgcaaagctctaaggttcgacttctcctcagtgagctgcagtgattacctccacctaaaggcagcagggagcaagattccatagtgtttctatagaaggatcagacatctgcagattgatcacaaagcagcaagagagatgcgatgtgagcaagagatctgagcagagcccacagccctgcaggtgcttccttctcttcccctcctcttattatttaaattaactccctggaaccgactccagctggatgctgatcagattaaggaaatggatgctgcgagaaaggattaataagctagaaacattttaacgtggagccttgaggtcctcatttaatctataaacattgacccggctactccataatatccttgggctcatttatgaaatcttttagccataaacaatctatcagctttataaaattgtcttctctctattattttccaggagagtagggggccgagtggagtgacagccactaccccttcgcgtgtggcttctctgtcccttctctgaacaccttccactgtaccagtcaggcttccagtcagcctcttgccaatgctctccggctctcccatactgaagggcacccccacccccaccaggactccctcagcctgtaggcatcactatggagggaccagttagatcctatcagagaccacagttgtcttctcaggtatcatagctagaggacatgcagtttataatgtaaaccaggacacttttgcaagtgaagcagcgaagaacattagtgattaaggctggacaacaggcacagacttgtcacctgtccttgatcacagcctttctgatggtaaggatggccctggtataactctttcgcctctgtgatgatacagacataactagttcactaactagttcactgggtaaagcgatagagaaaacaattagttggctaggccttccggagggaccatgctggtaaataattggagagattagcagttccaagctaccgaatttggcacttcagtgattctgtggcccttgcaggagttcgacaatgtgccattattttcaacattacccccaattggcctagaaccccaatccttccaccttaggcttcaggatggcagaattacagatatgtaccatcatagttagcttctctgtttttaaaaaattattgtgtgcatgtgtgcgtgtgtgtgtgtgtgtacgtgtgtgtgtgtgtgtgtgtgtgtgtgtaaacatggggactagaggtacagaggtcaatgttgtctgtcttttgcaatcatttccaccttaggtaggctctctccctgaacgtatagctcattgattaggctagactaactagccagctccatgaaccctcctgtctctgcctcctccatgctggggttacatgcgtgtgccatcacacttatttgttatgtgggtgctgggaataaccctcaagttgctgtgcttgtgtggtaaacactctgatgacttagcttcagctgtgctgttttcctgtcttttcaatgaagatgctggaccccgagatttaagagatttgcctgagggcagatgcaaagtctctgagctgcaagcacaagcccagcctgatgggctctgactttatgagcagcagtactgggagactgggctgggattgagtggctaattgtatgtaagatggtctacttgcatgcagccccaaatacatttttattttccagtgagcctcaggagggaattacttcctgttgatttccaactagactatcaaacatgtgactatatctgatgacataatgtaaagcaaaagagtttcagggtatgtgtgttatgtgtctgcatgtgtgtgcatgtgtaggtgtgtgtatgtatgtgggtgggtgtgtgtatgtgtatgtgtgtttgtatgtgtgtatgtatgtgggtatgtgtgtgtttgtgtgtgccctgtgcatgtgtgttatgtgtctgcatgtgcatacacacaagtgtgtctgtgtatgtgtgtgtgatagactcacacatttgtgtagttattctttgaaggcttgcttatcattgttagaaagattacattttcacacccaggaaaagttcaggttagcatcggcagagaaccagaggcctccctcccttcatctgtctgactcaccccttagtctctcagaaggtcctgtcagcttcagaaagacttttgcacaggctagcctgaagttcagatcagcaaagatattttgcagtgttttgttttgagacagggtcttaatctgcaatctcagactggcctggaacagctctgccactcttaacttgtgaccatgtcattcaccccctgtctgtttcagtttctatctgcaaagacatgggtgttaattgccccagctatgtgatgactggtcatcccaggaatgaaactgagcactgtgtgcaaagtccctagaataggtcctgcctggaacagccctagagctgtcttacctgcttcatgctcactgccctttgaaggccactaggtgattgtactggctaggtttgtgtcaacttgacacagctggagttatcacagagaaaggagcttcagttgaggaaatgcctctatgagatccagctgtaaggcattttctcaattagtgatcaagggggaaaggccccttgtgggtgggaccatctctgggctggtagtcttggttctataagagagcaggctgagcaagccaggggaagcaagccaataaagaatatccctccatggcctctgcatcagctcctgcttcctgacctgtttgagttccagtcctgacttccttggtgataaacagcagtatggagttgtaagctgaataaaccctttcctccccagcttgcttcttggtcatgatgtttgtgcaggaatagaaaccctgactaagacagtgatctattagagcaagcacacagactaatggacaactcctggtaatggttaataataaagaacaagatgctagacctttcactctaaaagtggaaaaggtgtggcaactgatgtgtaggctacagaactagaaaggagaaagacaaaaggtgttgagaggtgtgtgtggggggtatgtgtgtatgtgtacttgtgtgtgttaccaaagggcacatataatataacacgcaaggagaaaaggcagtatgggcaggagaatggtttaatggggagggcaggaagacaaggggaagacaggacaatcactaaaaatatttttttttctaaaataaaattttatttgaaaaccccacaatgaaacctaatattatataaacgaatttaaaattttataataaaagtgattctttaaaaaagctgaccaggcttcatggggacttgcagagatcagggaacctgtaggcatctgacctaggtcctctgtgtatatgttttggttgactagcatggtgttctcatggaaatcttaatagtgtgtatgtgtgtgtgtgtgtgtgtgtgtgtgtgtgtgtgtgtgtgggttagggggctgcccttgactattttgcctacttgtgtgacccttttttcttcctgttaggttgacttgtccagctttgatgtgatggtatgtgtctggtcttattgtagcttgttatgctgtattggttgatgttcctgggatgtctgctcttctctgggtgtaggggtagatctgggaaagaggggaggtgttggggactcagggtggaggtagggagaggttgtgaggaggggagggagaggaaaatatggttgggatgtcatatagaagaaactaataaaaaatgtaaaagttattttaaaaataatttttagatatattttatgtgtatcagcattttgtttgcacgtatgtgtgtgtaccatgtgtgtgcctggtccctgaagcggtaagaagaaggtccgatccgctggaaccggacttaaagacagttatgggctgtagtgtaagtgttggagatggaaccaggatcctctgaaagagcaactagtgcttctaacatctgagccatctctccagctcctaaaagtggttctttagatgcaaggcagccccctgaaattctccaccccagcttagcacatgatataagatggcatccttctttacgtctgactaaaaaccttcaaggttttaggatctcgtttccactttttaaaaaaaactgtgtattgtgtgtgtgagagagtgtgtatctgtgtgagagagtgtatatgtgtagagagagcatatgtatgtatgagtgtgtgtatgtatgtgtgtgtctctgggtatgtggtatgttacacagggcgtgtgtggagatcagaggatggctcgctggtggagtttttctctccttccaccgagtgagacctggggatggaactcgggttgttggctagggggcaggcgcttctacctgctgagccctctgagcagctcactagtaggctgtgcccctccagggttaccagctatgcattgtctttgccagagaccagtagagacattcataatatgatgactttttcagagacccgtaaggatatacaccaaaatagccacagtgtttatccacatggaaagagtttggtgatttttcatgtttttttttttcctgaaaattttcctaacccctagttgttacttcatcaccgagcaactgatcctacggcgttgctaactgcagtagagatgctgtcaaggccctctctccggctttcataagcctccatcctggagggagcttgtctctgatgtgggacacacagacagggacgaaggcttggatgtaggtgagaagccagttgaaagggagctcaggtctttagtgtagactcaggatactccagccccttagcagaaagcagcttggtgaaagataggcttgctgaggtctgcaaatagccttttttttaaagctagaacaagggttggtggcccaggccagtctcagtcacaggtggggcttcacctcagctctgctgcctagcaggagagcatcacttaagcttttccatggaagtcttctgtctccaccatcttagccacaccccacttccccacttaaccttacagccccctgctcccacccccaccccctttaccagctcttgttggcactgaatggtgcagagtaccagcatggctctgggttctcttcagagctgtgattgggtggtttcctcccaagagatcatttatctagggctagctctggcctctgggctggcatcaagccagtcagggtggggttatggtgccctgactctgatgtgcacaaggctgcttactggttaccatggcaccagtccagcctggaggggactcactatctaatttcctccctcatcctgcagtccttcagtacctcactgtctccccacccccaatcaattagacaagtgagcaaacaggtcttggttgaccctgctaaagggcaacaggattcccactctgtggggagccattgggaaggggtctaatgacataattacaactgccactctccagagtggctactaagtgcctggcacctgccatgcacatccatctgccattaactcttccttacctgcacagggtggcgccccatagtgggaatagtttaatggaggtgcttgtggtctaagagggagaatttaaacctcacctgcagtctcagaggtgctgagaggacagggagagagtgggagagagcaagggaggaagggagggagggagagagaggagagagagagagagaaagagagagagagagagagaagagagagagagagagcttccttggtcagcttttactctctctgtgtgtgtgtatgtgtatggtgtgtatgtgtgtatgtatgtgtgtatatgtgtatatatgtatatatgtgtgtatgtgttaattttttggttactaggaatcatgctgctatgagcattcatttttgtgcaactgttgtgtgaatatataggttcatccttctttggtttgtactgcctctgacattgctgagtcctttgttaattctcagtttaatattttgaagggtcaccaaggtattttttaaagctgtcccattttcaaacactaccaacagtatagaagaattcaagttatttcagaccctcacctattttatttatttatttgctttatgatttcttcttcaaagtaggtgggaagtgttgactggccatgactttagcttgcacgtctacagtgactaatggcagtgggtatcttttcatggccatgtctctatttaaaaattttttaaaatttcatttttatgcgcatgggtgttttgcttgcatgtatgtctgtgtgccatgtgtgtgcctggtgccagtgaaggtggccagacgggatgtcagatcccctggcgctggagtttcaggcagttgtgagccatcacgtgggtgctgggaaccacgctgtgatcctctgcaagagcagccaatgctcttagtcactgaaccatctctacagttgctgggcatgcgtgttttttaaagaccggtctcttcaaaccctgtgctcattgataaaattgagttatttgtgttacaatatatgtctcaccatgtagaccaggctggccctgaactcacagaaatcttcctgccactgcctccttagtgctgggatcacaggcagatgccaccatacctgacttaccaatactctcaagtgatgctttgatgagccataaatcatctatctactttcttggtcacattttaggtttcacattttaacaatcaccacccaatttaaggtcacagagatttgtttgactatttccctccaggaatcctaaagtgctgtcagtcatatttgggtccgtgattcatttttagttaactgttgaggtatgtttaatttttattattaaaagtcatcttgggcttgtgaggtagctgagcaggtaaaggtgatctaagtctgatttcctagaacccttgtggtagggttccactctctaacctccatatacacaccgtggtatatgcatgaacacacacacacatgcacacacaaaatgtaataaaaataaaagaataacaccaaagtcatctttgtcagggttatggaagcgtaaacatggatgaaaatagctttacattttctaaactggattataatattcagctctgtcttgtcgctaaaattactagtcacaggatcccaaaattataggcttagttttctgagagaataagtaaaaggttcaatctcaaattaattttattttgaaattgagctaactgctcagacatccaatttcgggagatggctgacattgcccccagtgagtaattcaagaaacacaggaaacaaacattttggggctgtttctggggaactgtttaaaagtctgtcttggaaacatttgaaagcacacgacttagatgcctgcctgcatttatgtggattcccatgtttaaatatgtttctatagtttgagtcagagagtgactgatttctgccttccactttccccagcagctcctttttgtaaaataggtaagagtagtctgggcctcacagggtccttgggagggttagatggctgagggatgtgctggaagtttagaatagaacccggcccttaggaaatacttacttagtactcattactaaacatctcctttgtttatcttaatatttcctgtatgcatttcagccataagcatagtgggttttagaaatagttgaataattatgataatacgtttacagcttgcttgtctctgttttccagtaaggtcttatttagcccaggctggtcatgactcccctgaatgttgggatgtcaagagcacatggccgtgtccagctcttttatatggagtaatactacattcctcctgtagttataaaagcctaagttccaagtctcagttgtagctctggtggccaagtggattgagcatctaagacagagcagggctaagctgatgctgagttgcgggcaacggcattcatgatagtcagaagcgagcggggtgcatttccacttgggtggaagtgcagccctgtgtgaacgttcccggtgatttcttacagggcgaccaggaaaggactgccaacccagctgctctgctttctagaaagcaaaagaaccaccaagtgacaggaaatttcaaaacaatttgaggcaagctctgaggcattgtgggaaatgcctctggggcattttagagtcagttttcatcccttgggtttctgtctctatccttggtgcaggggagcaggaagagagggcggggaccctggagcccaggactgaggtctcacagccaataggctcatagggaattggaggccagtttgtttaccatcctcagcctctctcatcttgaccattctacaagagttcagaaggactgccaggagacatacttacttagcacacaacagacttacagatttgctaatatacattactgaagtcaaatgaggacattgctgtactttcagttttttaatcttactactttgcttattgcagtcttaggaataatttcatttattttccctttactttctagttattacgtgatttctctctggcctgctgatgtcaaagcaacaacatgtgactagtcagaacgataattcattcctctttctcctcctcttcttcctcttctgtttctttctcctcctccttcttttttttgagagagtttggagtgtgtgtgtgtgtgtgtgtgtgtgtgtgtgtgtgtgtgtgtgtgtagccctggctgtcctagaactcactctgtagacaggctggctttgaactcagtgatctgcctgcttctgcctcccgagtggtgggattaaagacatgcacccccaccactgagtgtccagttaggcagtaattagggagggacccgaaactccatttgctgtggaatcgggtgacatgagaacacatttggtttggcagctgagaagaaagtcttctaaacccaaggcagggaacaaggtattaggaagagaggctgttttgtgtttttctcttacagttctttgcaaggaaagacaaggaggggtttgctgggagagccattctggtgaagaaagttggccttcctccaagacatggttggtctcagagtgaccagaggaatgtctaatgccctaatgctatgcaagagaggtccacttctctgtccttggctgggggcatcccacacacttaaggaaaaaagggggttttcagctctgagtaacgattaaatgttggcctcagtgattgccatttatttctgttctttcaagatgaattgctttaatatacaataaaacagaaaaacatattacagactagagaaaaaaatgatagcttaaacctagtggttgtcagccagagtgctttggtctccactcccagtgacattttgatggttctgggaagttagaggtgagagtcaatgattctatgtacacagagactccacaaaagaacgattcgctctgaattctggcagggctgaggttgacacggtctgccgaaatcctacaggaaccggatgatcccacttctaattgtgttagcatgttggtgcctttcattatttcctgtgcattacacacaactatgtgtatagctctcaagtctagatctattcattaggccttatattccaattaaagaggttgctgtacattattcagaacttcgcaatttttgtttttccctgtactatgaatactctagctggctgttattgtgactgacacataatggacaattttgtacatttgcccctttcttatttctgtgccttttaaggataggatttacaaatgttcacattttctttctgaggaaggggtgaagttattgtgctttttagtaaatatttccagttgcttcccaaaggcatgaaactaatttcacagtgtcaatagcagtgaatagcttcctgtttctctatgctcttgccagagcacaacatgaatgttttggggagaaaaaaaagcacccgatttattcatttttatttatttattttgctaactcaataggcaaatgaatgtgttgcctctttgatccataatgcttttctgttgggagaatcattgttcttataattttcacaaggaccatcagaactcattatgaagcccctgcctttctactcagcaggggctattaagagaataactctgtatctttagaatgatgcttctccttgctacaaagaaatttattaaggaaactaaattacagcctcaattttgtagaagggcttttaagagaaccagaatcattcaaagcatcatggaaaatctggtcaaattctaagaaagaaagtatattgttttttatgaaaaccactcaggttgaaatgaaaaggaacctcgggtacaacttagggctccatttacttgcccaattttggttctttgcagagcccttggtgctcttcaccatggcgtatacatagtgtctgtgcttggcatataaagtggtcagtggatgtgtattaaacatggataaatgtgtgcccatgggataggcatggagtataattttccattataataatgccagctgactttccccttttgaagtatggttggcctgggtcacagtttgctgggcactgaagacttggtgagggagaaacactgccttatgtccccctttcactggtgagcatttccactgtagtgacaagtgatggagagcagggcattgcaacctcagctctgttagaagcagggacttttaaaatacatctgtccatgtagttacaagctgaagagggtatagatttaaaaacatctttctgatttttgaagattgggttctttaatattaaaatatcacaattttacatcatgtttcctaaggattttttgtccctggggaaaccctcgcacacttagaagtcatttgttgtcaccgaaatttcttctctctgtatttcatcatattgaattactctcatcttagaaattgtgtgtgcaaactgatgcctagtttttgagctctctactacttgttaattgacttgactcttaaaacttgttaatttcttgtacaatggtgtccttggattaggaatgctaccctgtgtctagggtcaggtaagcttgcctaagtctggcagccatgtgggcagggcagggccagtactgtccccaggaggcagtgaatctgggacagtccttttcccgacctccctcggttgtgactctttggagctttgcactccttccagccccagcctgtcgttgagccagatataaaggggcagcaaatctggcgcttaaattgcctgatggctccgcgtgtgtcgttttcctgggaatcaggcccttgtcttaatcacttactggaatgagttggtaaaacagctctgtgcatccagtggctggttctgctgctcagtaaggtgttacctcaccagtcctacagttatcctatggagcctgtagtttgttcctcttccttagataccatattcatatcttaggtatgtagatacctaaatacacatgctcttcaaaaattcaaacaggtaggaagtcataatcttttttttttttcaacttcctttcccttacgtagggcccattttgcaaatgtcacagctgttaaggtcttgcgtattttgttctaaacctcgcttttgatttctctccccgtctggcctcactctttgttgatcgcctacctcctaagtctgctttcctgtggttctgggagttgttttgtctcacctacaacacaggcaaagagaagcacactagcttagtagtttcctcgtatccatgtgcaatggatcctgactgataggcgtccaagttacatgcttacacttgcctttagtgaatcgcatccttaccctctgggttggaatcctgtcccttcttctggctttctgtctgcattgctgtctgtctgtaggcttcgcccctctccactgggttgtgtgtgagttgtgaaatagttcatacctagtggtgcacccaggacagggagcgctcgttcctctccatctatgcctctagctgccttcgcctctgcacacagacagtatgtcagtcagagaaactcctaaatgcagaacttctgtcatttcagctcaaaagatatgggcgatgctaattttgaagtgtgttggcagttcttcacacatgtcgcctggagtgactcttcttgtggtaactgggaacagttttactcttgaagtacaagggccttgaaaacaagtgtggtctttacttccttctacttatcttaatgtttgacctcggtacagattgatgcatcttaagaaatgctagtgcgaaaacaagcctggggcagctctgctagcagctctcccacggaagaatcggtgacagcatgggagttctaaatggtcttcactccgtggttacaattttctcctttgtttcaatataggctgagaataaaggttacctcctacgcgtttaatgttgcttgacatttgcatataggcgtgtacatcctgtttgatgaatggtgtcagaactcggcaggatgattgacacctgcgtgtagtgaaataggaaaacattccaagattaattttccttctctctgagtagggttaggggtcagacacaagtgacatgctaagctctgcttacatgagtttctagtgtctgatgaatgacggcattggccactacgtgggcggtaacactgaggtttctgcacacacagtgtctggtgagacaggacctgccacagggtcagatcaaggctaatagatatccatccacaatgagatgcaaaactaggagaaagaggagtgagtgagtgagtgagtgagtgggcgagtgagtgggactcttggcaggtagctctgagagaaaaccctgggcttgtggagactcctgacagctcagtaaaagaggcctttatttttgaccttcctgtagggtcttaggcatggcttatttctagtggagcatgacctaggagttcttttgagaaaaggtctctcactggactggggtctaccaattaggctagactgccagggagtcccaggaattggtccctgcctttccagcactggatttagaagcacataccaccatatcaggctttctcactctctctttttctctccttttttttttttttttttttttttttaacctgggttctggggacaaagtgcaggtccttataattacacagcaagctctttgagacttttttttttaaaacctaaaaagaagagtgaacctgtttctccaagtgttttgacctctgccttgtcagcatggttgggagtggtcctgagaaggctgagatgagccgtgtgagctttgatttcagaacttccctgtggtcatcaagttcatgtctttggggatgcagtctaccctcggcatggaccccttgttgctcagatgacccttgtgagggtcccagaaggcttcattgcgatatccacaggcttctcccctctagttgttttctgtaaaatagattctgtcatctgttaatcccgatgcctctcctttaacatcccctaccctcctgccatatacgttgccaagccagaggagtaggcagccccctctcatgtcattatggaaggaggatgctagaagtgctctgccttgcctttctcccagatgagagcagacgccagttctggagcccagaagcctgcgaagctggggggtccaggtgtgcggatgagggactctggcaaccctgaaggcctcagtcactaaagcagcctgccgtgggcttttgtggggcctgtgtctgggctggaaagggatttcccacgtgacaggctagaggggttacagggacctccaggtgcttttactccctgtcacaggagctctgactgtactacttacagctctgttgggttgctttcacggtgtgcaacctgggagaagctttgaaagcagagaagggggatcacgtgatcccttccactgtggttgcttgagtgctttcaccctgccaaggtgccggccccgcccacgcttgtggagatcctaggtgcaagtctccatgccgcttccctggccttagtgccccattctttcatctcctagacagtcgagtgtggcaggcctcttggatggtcttctgtgtcctcttcctcccccaagagcagaagaaagcttcatttctcttcgttatgcagcctctcctctcaggtggcctgggtgctgcctagtacgtcacccgtggagcaggctcagggtatctttggctgtgcccaccacagtgcctggcagcagctggaaggaaaagctccacagacccttttcatcagccatggggctgatgggacaaaccagcgagtaaccttaaacaaagaagcaaacaagtacaatcacaaaacaccagctttcttatggctcatttaatgatggaacactgtcttagtacttgtcttgttgctgcggaaaaaaaaaaaaaatacttgggcaagcaactttaaagcaggaggagtttactcggcttaccatggcagagagggtgtggctgcaggaacgttaggcagctggttccagggcaccctgtcaaaagcacagagcaatggctctcggaccccaactcattttcccctttttagtcaatgtgagagcccaccaagcccatggaatggtcacccacatttagtgtgtcttcccaccctgggtgacccatccagataatctcttacagtctcacacagagactggttaccatggtgattggtgattctcaatcccattgagctgacaatcaaaattagccattgtaaggagccactctgtgttagttcacttaattttaacttatttagaaattttctaaatggattgggaaggacagtggaacaaatcctccaattcttttctcaggattcaccacgtgcccacatgcccctcctacctctgccttctcaagctcttgtacccccccccaattcactcatatacaaacatacacacacatacacactcactcatacacacatgcctaaaaatacacgtacacacctactcatacacacacatacacacataccagataccacacgnnnnnnnnnnnnnnnnnnnnacacacataccccacatatcacccacaccacacatacaccgtacatcacacacgtacacacactatatcacacacacatacacaaatacatacacacctctctctctcactcccttgtgtatgtacaaatatacattctgatcttcctctttggtggaatagtctgtaagcaggcactcttccaatgttgaaggcaacccaagtggtgtcatgggaaagaacgaggaaatctgcttttcaacagactgggcagttagcactggcttgtgtgagaaggtgacatcagagtgcttccgtgtgtacaggcggcagttagcagcgtccatgtctgtagcaaaaggaaaggcgctgtcctgagacagagccactgtcttccgaatgctcactcagctttgccatatttggggctttggcctgtgtgagtcctctatggttctgaactaacctcatttattactaccttagcctctcgggggctgtctttgaaaaagtgcctttcattttgcatgcattctctagcaggtttattaatgtgcaaagaggcaggggcttgtgcagatccgggaaatgtttagtcagcagggcctcccggccctgtgaaatgcttacaagagctaagcgacctgggatgacaaacagacacacttttgcatattaatagctgtggcttaatgttgtaattgtactgaggaattctgtacatccacatatagagggaagtacaggccgtaccaagtagccagaacctcagctccttctactgtgtaatggagggttttgttgagtttagagaccactggaaggcccccactgaggcactttggtgactgcatgctttctgatctatttagatgcatatgtggctcaagtgaaagacacacacaccctagaccagcaggagacaggcactttcaggcccattaggcactttgttgactaaacagtgggggagttgtgcaagacaaacattgcatactggtgtgaggtagaaataacaacagctcactccagactgaggtaatctgaaacgtgaaccaatgatgttacaagattcggggtgctatggaagtgatgggtaacccctaacaaacccaggtactgtatgggtttggcttttaagtcctccccatctaggctctgtaaaaccactctggggttgctcatcactctgacaggtggtgctgtcgctgaggataggcacatggcgggtctgtggagtggggaggtgcagggaatggcagactgccgcttggtgcagtcctgcttctagttactgactgcatctgggctctctggcgctggcctttgctgtcaggaatggtccatcgataccttgagatagaagtatttaagcctgggtttcagcagggtgtgatcaagcatggtttctcacaggaagccccctagcatgctgcaaagcatgtggttacacacgcgcatgcacatgcgcacacacactttccagagcactggtaggggctgctgagcccctgtaccaagaagagactccccagggagggggagactccagggctaactggctgtctgagaggcaaagaggctgagaggattgtgaagaggcccaaaagacatgtgttttataccgtggtgacagcggtcactggggggctttcagtggatcagtttctgtgacacctgaggaagcaggcacagaaaagaggcctctgctcatccatgaggtgtcgcagtgacttagttcttagtcactctgcagtgagtgtggaatcaggctgggctcatccaacattcagcaggatcctaccctgggacctgaaggggacgtgggggcagttagggaggtcagaatgactttgcaaagaaggatttatgtctaaactattaggttggaagagaatctgtccccatggggatgaaagtgactaatgtccggctggtctttgaatcatcactcatagtcagtacgcggcagcgggcacctctgggttctaagtgcagagtatttagcagtgaacagggcaggagagcactgttctcctgggacttctgttctgtgggtggaggtaagtcacgtggtaagccagcgagccccagaggagcacagggccatttagaaacagtcttccaaagaaaacaagccttgtgatggctcagagtagtgttgtggaattaagatatgacgccattttcaaattctggcatcagggatgtgcttgcttagcatatatggagtttgctaagccaggtgtggtgcagcctgcaaccccacctccgggggagcggggagctggcagaggagtaaaagctagccttggctccagtgaacatcagaaaacaagggacagttcttaccacgaatgcattttgccttttatttattgttggcatgcccacaaatccgagctattgttattttgaccgttgtttagcagtgcggcagacaattttcagacaaggggtacggcttagcaggaggaccttcccgcccaggactcagggtgctagcctcaaaaccgcagaaacaaacaaaaataacaactaccacccctttcagattctcttttattttcccttttaccagtcttactgagggtgctcaaagggggagaccccaaagacaggctacaagagctaaccatggaaagatctctgtagctccaaaacccatggaaaaatgttttggggtttccggagccccattttatcgggacctcacttcccactcaggaaccttggtgttgtagattactgcttcccaacccctctccttaactacaggaaggaaccctgccaaccacatgtctcccactgggaaaaataattggcccagggagaagggctatttttagcattatttcaactcaggtttaaactgttagttcatagaatatggtagctattaatttaagatgtgaagatacagttactaagcgtagctccctcccactcatttggagtcttttggctgggtgaaatgctacttattgaatggagtgcaagttccttctatctgaaggtttcaggtgcagcctaaatccagcaatggcttgggagcaattgaaacatactagtgtgtgtgtgtgtgtgtgtgtaagggatgggagaatgaattaggattctaggaaggtatgataaaaggtgagagcaaatacaaggccaatgttttaaaaccaaccttcttgcccctgtatgtagaagcgtgataggaatacatattctctggagctggtttaaaagaagagaagaagccatttaaaatctcgcatctcactctcttttgctatacatccatttcatatatgcaattttactcctttttcctactttcttgatttctttttctttttctctttcttaatctcccccccccccccccagacagggtttctctgtgtagccctggatgtcctggaactcactttgtagatcaggctggccttgaacttagaaatctgcctgcctcatgccaccactgcctagctactttcttgatttcttaaagttttttgttgttgttgttgttgttgagaaattaagggttgggcatataatatttttacttgataaatgttctgttgtaattttcttttctttcttttttccttaatggggccgtgtatcttgccacattgccaaggtatatcttgaaattgagcctcccaccacttggtagctggggtataaacagaggagccgccatgcctggctttcttctgtcactttttacccttttacagaactctctattgcagagttccctttgcttcttcccaagaaaggctgagatgaggctgttttggcatacatgtctatggaaatatcgaattttcacaagagaaatggttaaacgttaaatgatttactgggtccagcagtagagcatttcttagggtgtttggtacacactgccaagttactctccccaaacagcacaatctcacattctcagtcgctgcccaactcatgctggggtttatacttccaatgaattattaatctgatagatgatagacatgccatttcattgtgagaccttaagataaggaagacagggtggtgcaggaaaactctacttgctttagtttcttcaagtccttgtctggttaagagcaaagatccttgtttagctgagaataaatattttttctgagaactgctcagtttaatggttcacaggtggattgtctgtctgtctgtctgtctgtccgtctgcctccttttcctcctattccctccgtccctcattggagctacagtaggtattaggtttatgattgatagctcttaatgctgaatcctcgactctatcagtgaactccagagctttgttgtaacttcaagtcccgtgatctgtcatttgtcactgagagaggatggcccactcaagaaggctcttctccttagtgcctttgttcatgattcagaaataacacctgcgtcctgacattatcactaccgcctgaatgtgttttagacctcttatggagtcttcacagtgcaagagttccctgtgatatcacctaagtgccaaggcttaggggtcactgtgtttctgtttccttcttcaagagagctagtacctaccattgctgacattttttatttggatctcaggactttctttttattttcttctcttcttctttctttcttccttccttccttccttccttccttccttccttcctttccttttctcctcctcctcctcttcctcctcnnnnnnnnnnnnnnnnnnnnattcactccctcccttcctcacctttaatttttaaaaattattaagagtatgaaaaaaaaaaaaaaagatgggctagggagatggctccgtgggtaaagcgatttccagcatccccctccccctccccctcctccttctcctccttctggtatcaggtactgagctcaggcatgctaagcaggctctctaccattgacaaacattacttttaatctcagggctttctttctattgttaatatttgtgtcagtatacaggacaaatgcttttattctgtgggtaatacaagtaaatcttaaagtgtttggataacttccttgagatgacttgagatgacagaactaggaatagacaatgctggaaactgaactgattccagaacacttgttcaaacgtcccgagtcccagatctttaagaactggaaggaaacaccagaataatattaaagtaatacttatcaattttcagcagttggggagatgggtcagtcagtagaacttttgctattttcgagttttttcacttgggccttcattcttgtttagcttctttgagtctctgaagtatagcatgggtatcctgtatcttatggctaatattcacttataagtgagtacataccttgtgtgtcccttttgggattgggttacctcactcaggatggtattctctagttccatccatctgcctgcaaaattcacgatgtctttatttttaatagctgaatagtattccattgtgtagatgtaccacattttcttcgtccattcttcagttgaggggcatctaggttgtttccagtttctgagtattacaaataaagctgctatgaacatagttgaccaagtatctttctggtgtgttggaacatcttttggatatatgcccagggggcccccacccacttggagaagggggagagggatggggaaaggattgtaggaagaggtgactgggagtggggcagtgagctggatacaaagtgactaagtaaaaaataattaaatttaaaaattaaaaaacccactttaccctcatatatgtaattgcaaatagcagggtagactctgaagccgtatcacatgcctccattaaagtcttgactctgtctcattagctctcagtcctaattcaagtgaaataacaattgcttgatgattcagtctactcatcagtataatgggagaaatgtgtttactaagtttaatctaatatatgaaataaatgtaatcttctagaaaaaaaaaacaaactttttttgctgtgtaaacatgagggcttgagttcaatctcccagcatccatataagaaaaacatatctgagtgtagcagtatgtacctacaatcctagcactaggggtggtggagataagaggggatccctgggggcttgctggccaggcagtctagccagatctgccagctcctgtttcattcagataaggtggagaacagcttgggcagacaacagatgttgacctctggcctctacgtgtaagtgcatttatgtgcatatgcacctgcctacacacagatgtgtatatacatacctacaaacacccctggccaatgtatagttccagcccagagagtctatctgcttgctctaagagagagaggctggagcaatgaagtgaattagaatcctgaccacaccttccaagggaattgtgcttgagcctctaagcagttaaaagaaagaaatcaaagttggccttggacaaagttggaagactgactggatgagacgagctcctgtggatggagagccaaacagcatgaggagaaagtgtgatggggagagccataaacagggaaagttgcctgagaatgttcagaggctggaagtcacatggttcacccaaggcacagtgtgggcaggacagagggagtgttccccatttggaggctgtgtgtattagtattcagggtaaccaggaagagaatggggaccataagcaattagccagcggggaagcaaatggatggtggtgaggtgggtggccgcaccctacttgtctgtccttttaataagtaaaatgatggcataatttcacccattcattgaatgcttatgcaattagggtcctgctgctgataaaagcttccagagattttagtgcaccaggcaaacagaattatggtgtttactttaaaaatcaaacttgttctctttcagggacttaattgtatttaaatgctcaatttttatgtttactggttctgcatttttcttgcatagattaggatccaatttaaatatatatatagtttggctgtagaaaacatggcctgacagaccgtgtttttatgtggaattgcagagttttgtaaggatgagagtgttacagccctcacccaaaccatattgtctttaaagcagtagatgaaatataagatgttccttttaacagttccagaaattctatcgatatagttttaaaattttggtaaaagatatattacagacgttaccatcttaactcttttttttgagatggagtctcactatgtagactggctggtctagaactttctatgtagatcaggctggcttcaaacctgcagagatccacctgccgttgcctcccaagtactatgatcaaaggtgtgtttctctcaagccctgctcaacgtaaccatttaaaatttatttaatttaattatttttgaaattaaaatgtaattgcagaactttcccctttttctttttctcctcccagctctccctgtgtatcctcccttgcttcctatcaaatgcatggcttctattatttaatagttaatgcagatacacagacacacacacacacacacacacacacacacagacacacacacacagacacacacacagagacacagagacacacacacacacacacacagacacacacacacagacacacacacacacagacacacatacacagacacacacacagacacacacacacacagacacacacacacacagacacacacacacacagatacacatacacagacacacacacagacacacacacagacacatacacacacagacacacacacacatagacacacacacacagacacacacagacacacacacacacagacacacacagacacagacacacacagacacacacacacagacacacacacacacacacagacacacacacagacacacacagacacacacacacacagacacacacacagacacacacagacacagacacatacacacacacacagacacacacagacacacacacacagacacacacacacacacacacacacccctaaatatataaacgtaacctcctcaatctgcatactgttatctgtatgtgtgcaggctcagggttgacctcttgggattgcatagccaactgcggggctcttcttcagagaagacagcacacatgtgactgacacccaagaccacctcatcgtacaagagtgaaactcattaaacctcttcccattttcccttacccccggcccctgacctctacccacttgctttctgtttctatcatttggttacttcgagtccctgagagtcacacatcaggtgtctttctgtgactgagtcctttcacgtctgtctcctgacatcccctggtttactccccgttgcagctgtgcactttccttcttcagactgacctctgctctccatttgtcttgactgcattttgttcattcatccactggtgggaattttggcatcttccacatcactgtaatgagtagccctgctgagaacatgggtatgtgtagacatcttcttgctttcgattattttggctggaacccctccgaagtgagattggtgaatcatagtggctctgtgtttcgagctgtgggggtctccacattgtctttcactgaagctgaccattttactgcctaaccagcagtggcctctccccccctgctccccccacttcttttgctttgtatcctcaccagtgttcgctgccaccccccacccccccatcccatcaacagcagccattccaatggtgtcctgaaggggactttaagtttcttaaccacatcaaagttttcttcacagttaaagctttgtgatttgggattttgtatatactttatatactgttatactgcccaaagagaggatgtgaccacacagagtctaggaacttaaacgatacaacaagggannnnnnnnnnnnnnnnnnnnnnnnnnnnnnnnnnnnnnnnnnnnnnnnnnnnnnnnnnnnnnnnnnnnnnnnnnnnnnnnnnnnnnnnnnnnnnnnnnnnnnnnnnnnnnnnnnnnnnnnnnnnnnnnnnnnnnnnnnnnnnnnnnnnnnnnnnnnnnnnnnnnnnnnnnnnnnnnnnnnnnnnnnnnnnnnnnnnnnnnnnnnnnnnnnnnnnnnnnnnnnnnnnnnnnnnnnnnnnnnnnnnnnnnnnnnnnnnnnnnnaaattagtggaaaagataaagccgtgcctgtatgagaaactttacacttacacatttgggcacagccctgcaatatactgggtacttagggatgagagagctaaaactccaagacccatagccctatagctctcaagtaaggtgtggacactatttatttatgactctaccctgtgagctctaattcaaatctatggccaatcaaatgaaaaagccaatcagtgggagtagtgttttacttagaacccattaaagcaatttaagtgcagggtattttttttccaggtataaatacccagctttccacaggagagcaaatgtacatgtgggaatacctttatgaatgctctgggtgaggtggagagaggaggcacataatacagcctttcagggaactcagcagccgccacaaatccacttatgaacaatcaaaaaccatggagcttgtagcagaatgttagcgctcagtaatgctgttatttaagagaaatcagaggtttggatgaagcgcatggagaaatgggccattataaatttgaatacgtgttactttttggtggatctagtagatcccctccatactttatcccttgctcttgttgcatttcaattatgcaaataggcaaggagacatatgggcagggaagagtactttgcctataagacatggtttatagcccaatgcggtgcagtttttttttcctacattttgcacgcttcgtgatttgtagagaagcatagaaggcacctggcttggggagggggaggctttcccgggtcctcatgtttgcacaataagtactttgcctaccaagccatcttcccagacttctggctattcatttgtatgtgaggaagcagggcaaacaccaggcatgttattcaccttagtcatttgcttcagctccacagtccatgccccatctgtaagcagtagacaggacagggaagacagtagcaatagtccatgcaggaccttgcactaggagagacccaggaagtatcagtggagtgtcttcaccaaatacctatggtcctctggatgtcagctcttaagtaaccctggcaaggtaactcaccctgttcttgactccagccggaaataaagcaaacatcaaacaaaagctcaagccagttcccttggataatacattctgccaaccaatgtgccaagggtgattgtgtgatactctgtgtgtgtgtttgtacctgctggtttgctttcgtttatttttagcaggtcacttcttcatgaagtaaggtgtgagcaggagtcacagtttaagaggcgctgaaacaggctaccctgtccatgcatttatcatcaaggcagcatagagtctccaccctacccgtgccccagggattgcagaagaagtaggcgtggggccaaggagccctggagcatctcctagctaacctccctcaggtatattagtattccctaaattacattgccactcacttctatgtagacatagtcatgttgagccaggacccaaagccagcagtgtttccctgcttcccttgggtttaccctcaggctgtccacttcctcccgtgatgctctctggatcagggccagctgttgcttcacgtggaaaacatctacctatatttagtgtccccactgggccacccagcatcagcttactgttacttcatattcattaataattgggagaggagaaactgcaacaatgtagcactctacgtatttgcatttgcgtttcatttcagttagagcagacgtttaaagattttgttggctttaaagtctaaatttagaagttcttggtaggcgaagccggtttctccaagggtttgtaatctaacaattcaagccctgttcttttgcgtgtagaattaatccttcccagtcggttctaatgcctgaatggagacagttggaaatatttggcagatgggtctctgtgctctccattaggaatgaaaaagtcaagcattttggtaggagaatgtacttggccagaatcgaccaggcttcctgtggctgtgttcccattagcaggctttgggggcttcctgtggctgtgactatagttagtgtggtggaagagtggactgtattattctcacctctttaaaaaataaaaaagaaggtagctttcttccctcctctccagctactgtcagatttgaatgcctgctccagtttgctctgtcataagctgagttagtgggtcaagtgacaaggtctggcagctgtccatgacagcgactgcccactgccaaacacacccaaaaaccctggctacagatgtctacggagccagagtattagagttcggcctgtggatttctgtatatgcatttcttgctcatttcggtagctttgagttaaaaactcgatttcttcatgggtttagtttcttctgtaaggcaaatatatatatatatatcacatgggagacagcctaggacaaccctcctgtggtggaaaggcttgacctagcacaaaggttgttgagtcccatatcaagtcatctcccaggtggctgaaagatggctttctgtgtgatgtcaggcaaacaggctttccaggagtacatgttgccaagtcctcctatccatagacacacctgggttttcagtatcctacgctgaatgtcctaggggtgtatgggtatgcagtgccaaagctccctcgtggttagctcctaaaattaaaataaaaagaattcaatcatatggactcgctacttaaggtgtttggagcctaactcaacagaggtcaaggcgagggaccatccctttgcatcctcttaaactccttggctggaccctgaaccatctgccagaggagagggcagtgaagtcaggctggggtttcatcccttcaagtaagagagcctgtctgtttccaacggactgcaaattcttggcagcgtcttcctctgtagaggacacttcacttccagaaaacctcatttcaaggaaatgatagcatttgtgaaagtctttgccacgttacattgtcagtcattgttgctttgacagccaaagttctgttttaatgctgtcacacgattacagagatctggagaaattaatttcgcatgtgctctgcggacacctcattgagatacgagttgaatgcatgaattgacccctgcttgccttttcagacgttagtttgttttctgtccctatctgtctgttccttactgggccctgagcatgcccagctcaagaattccactggcctaaaatagtgtagtctgcaagttcacatacaaaaaagaaaaaaaattctgtgtctgtgtgtctgtatgtcagtgtgtgtgtgtgtgtgtgtgtgtgtgtgtgtgtgtgtggagagagagagagagagagagagagagagagagagagagagagaaagagagagggaggttgacttagggtacttttctttatcagtcctttctatttttatttttgagataggattatcactaaccttggagctctccatttgggtgaggctggctggccaaccagtccccggtatcattatgccgctgcctcccgcctcagtgtgatggttacaggtggaccctgtcattcacggatggcttttatgtggctgctggggatccaaactcgggcctttctacttgctttatgaacaaaacccctgtatgttcatgctaggcattaatgggattctgccattgtgaagaatatttcgcattttttgggagggaaagaaaaaagtagatttcctcttccttatggttaaattagcatatgaacattttgtgatgcattagcagaattttgcaacattctcacttggcaaggattatggcgttcatactgaatgctacaggcaccatttaaagtctgtctttaatgtaaatatacactcttttttttcatatgtgtttcttataaatagataatggaagagtcatttcaactcagcattgctctaacagttgaaacctatccttgtgaaatgctttggatgagggtttcagcatttatgtaatttgtcgttataagtatccatgccttcaagaaggctatgctcaattacacattataaaaattggtatcgacactaattcacaacactaattcactttttgtgtctcttttcgagagatggatggcatacaacttaagaaggagtcactggaaaacatccactaatcaaaatagactgtaggaggcaggcataggtcagtgacatattgtttgcagataaactcaaattatgcaagaagaaaaatatttggaggaaaaacagaatttgaatctgattatccagtgtataaaaagacctagccgtgggaatgtgttgactatttcatcaattgtgagttaattattacctttgtaattatataatttattcaaatcggtgcatttaggacattatttcaatctgaaagttgtcaaacactgtaatattgtaactttaggtttgaaaactagtttataaaagtgaggaaatctaggctgcttttgcttttgtttttgtttgtttgtttgtttgtttgacctaagctggcctcacactcatagctgaacaggaccctgagtttctattttcctgtctttacatcccaagtgctgggattataggactgcaccactatgtccaggttaaaattttggggatccctatattcttgtgatgtcaatcatgaagcaaatctggcttgggccttaaagctctctgtgtgttagcctgcgatggtccaaggaggaaggcccaggcccatcacggtacataatgcttgcatttgctcatttatgtggtcttaagaaggatggctctcctcttattgtatccgtttctagtacaagtattcatttcattttaccttgacaagcaataagaacagagaggccaagaaggtcacaggcaaagctattaattttgctgcatgctagttggttagcatgtgtaaaatgtgtcacttttaattgaaatagtatttgtcgggcatcttaaaaaatctaaattttgaggggtaagcttttttactgaatgctgagaagtggtgagtggaggattggggagagtttttaaaacctcactaaagtctgtgagtcgctctaagctgggatggggtgatgggcatgaggggggcagtataatcagggcagagtgtctgccttcccttcctcccaaggtttgtttaaagtcttgggtgtttacagctggccctggcgtgctgggtgaatctcgtgctattcatgatgtagggaaggaacatccttcttgtctcgtggtcctgtttatggagtctgtcgcattgatgggttacaattgaccggaaagatcattcactctctagaggaagaacacttaggagagtgattggcccctgcgggcatcagcaaacccagcatttctctcatgtggtgtattgggaatattattgtaaaaacagtacttgcaaagagatttgtacttagatagatgcgtgctatatactccatttcaagtagattacatctcaagtccttgagaagactggactcggtgaatggaccctgctgatgtgctgttcatattctttgttcctgtgctcctggtgagagtcacatggggcctttccatgaacctggtgcaatgtcaggtgggggtgagtcggaaggaccaactggcatctctctggcccttttctctgaaatagacggcggatgcgcttgtggatttctgccttgggtgcctctgattttcatctatttatttatttttacgatgatgtgcattgagctcagctttgtgcatgctaccaccaagccaaacccccatccctcttcctttattgtataggacatgataagagagttgtttttaatcgatgaaaatcatttacatgtctattatcattctctttgaatgaagaatgtttgcatatcatgcacatgggcaagggaaacacacatctagtaggactgaccatgagtgagttcgtagcgcaagctcagccatggagtcttccttgtttttcattgaaacttgcactaaactgtcagttattccagcttaagggatactttgtagctgctaaaattaccaaggaaacattctagtataagaaagtcattgcttaacttaaaaaaaaaaaaaggtaaactgttactcctggtttctgaacccagctgtgtaaatggcgttccaattcactggcgttgtgaagtagctgaactcttgaacttcacaatgacttcctcagaggccgccggctcaggactggagggctatgcttgttttggcttcaagttgcttccaccttcactgagccaagccttgcacagagttaatattttctacgattgattgctgtgtattgttttttagacactccaaaatgacccaggcactagctgttttgtgacacagcagaaacccatcctaagctggtactttcctcttccttccaagagtgtgtcgctacaggtgtggccgttggaccctctgcaggctacagaaccatttagaaggtttttagtaccatacctatcttcaccatatcaccagggttcttttaccgccttacactccagtgtgagtgttttgccttgctggtgtgagccttgatgggtagctgttagtgctctgagctacccaagccatagccacgatgaccatttagctgtcacgtgatcttaccactaaccaggtgttgcagaaatggagaaaaacctctattttctctagaggatggtcccgatgaggcggtcaagattccgtagtgctttatctgccttaactggggagtgcccgtgatgccccgcctactttgttacctgccatcattttgcctggatcacaggtatgcagacttactagtttttgttttgttttgttttgttttgttttgtttttgttttaagattaagttagcttcttacttcaaggacaatgagagagtccttggcttgtgcctaaagcctgcggagtaccgctccagtcacacaggggagagcctcaccaagaggaggaggaaaacccgggtccacctgtgggggtttcctgcatgagctctggtgcctcctccactctgtgaactctggaaccactccaccctatttttagcagccagggggctgctctgtttggggtaatacttgctccaaagtataccaccactttcccctgtctttctgtaactggcctggcagcgatgacgttattctaaagagatacttcagcccctcagtttggctatcaggatattgaaacactgtatctccccaaattaaaggactcccagcaatctcctgcagagagaagaggaagcctaaagtcagggcctgcaaaaggaaaacttttctcctggaaagagatttgcaacttgtcagcccactttgctgagggagaaaacttggctaaggctgcttcaaatgcataactctgtacttctaattaagcctaaacctcatgccaagagcctgaaaagatggacttcagtgaggcatggattgttttgtccctgattccaatatcgattaaaatcctcccccccttcaatgttatattttatttatttatttatttatttatttatttatttatttatgtgcgtgtgcgtgttatggaaatcagagggcaagttggaggaattttgttccatcatgtgggacctgggaacaaactctgatcctttatctgctaagccatctttctggccttacatttttactattaatttggctcttttgattgggttcatttaagatagacggctgaacctggcctattggggcatagactgtgaccctaagtatggtaacattttctttagctgtacaagatggcaaagtatctgtgtcctgtgtcttgttctcagtttcaattcagctaaatgtgtgggaatttcactcacagcaactagttcctacaggacaccaactatcaggggcagggaaaactgacaaccactcacagaccattcctcagagcagctatccaagaactcagacttatgcttagagttactaattcattataaaggctgtgacagggtcctagaggagtagccagacagaagaaatgcagtgaggtatggtttgcccattgtaggaggaacggtgcagcctcttctgtataaattcgggagggggcttggggggacagctacaaaggcatctccaataggagaaccaattgaggactgcctgagaggccaaggattgtcgatacagacattgccagtcaattgggacctgctgtttaggagagatgctttcttgggaccaatggggcacgggtggacagtattaaaggagcttgtggcagcgttcagacaagcttgttgggctgtttttacctgcttctggagtctgtgtctgactccatgccacctcacttccagcccccaagggcaagtagggtccagcagcaggcagtccagggcacaggcagcaagcccatgccttctctgagtacagcatccacctggcactgccatgtcctttggggaatttacgagtcttcatcttagagacatgttgtgttacatcattgaccatcagtgatcagctgaccttcagccctcgtcactccctgaggacagaggttggtgctgaaacttctagcttaaatcaaatatttggctcttgggcaaacagtctctattctgatagcctagttccaatgttctaaagaggtagtctgcagaggttacctctttagaacaaaagatgttccaattatccacaagatccaaaggatttagaagttccattctgggtcaaaggtcaaatattagagcagaagactcccatcatatcttgagccacggagctgataccagtaatgtctcgtcttataggatcacaggcttgtgatcatatggcgtgaaggtgagattttacatctctgttcttctgggcaccatagcctgttccatacacatgtatggtgcaagagaaagattttcgaaaatttgaatgtctcaagtgacatgaccagcttggcaacagtgcttcccctaaccagtttgtatttctgtttgaatgtgcaaatcaggaagatgtgaaagtccgtggacaacaggcaggatagggaaggaaacagaaaaactccagaggatgtcttaacacttcctggttcctggtgctaggattcttagggagacactagaaacaatgtaaagatctgttagtgatatagttactgtgatgagaaatggcaacatgtaaaaacctataggcacaacaggaagaacacgatgggaatatgcttgaatagtcctaaaggaaaaaacaaaaacgaaaagaagtgcccccaacgtggtcccaggtgccctagctcgggcccagaaagcctccctcacattttcccagctcttccaggcttcctaaaatggaacaccttaatagtggtcatttatataaaccttttcaagaagacagttttgtatttatgtagtagaagtctctatggtctgtgctgacttcaaatttgtcaatattgtacatttaactatgattgaggcagcagatgctgtcaccgagtttaaatattaggatgccaatcatctaggaaataacaaagtagcaaaggaccctctgcgtgctacattcttggtcaagtgagggctggggaggggctggttctgagctgaagtatgcctttcttcattggccacagtgatctggaagagattagaaactcaccaagaagaggccgtttacccacatactgccccagagatgtaaatcattaacttttggtgcagctgtggccccgagagagttgggaagctgttcatttaccggcactgtagcagaggccaggggcttcaaaccacactgccaatttctgagtgtttcacagcatttcgcctattcccgaccaagatcaaagattttgttaagttgatattagagatgtagaggaagtttatcttcggcagaaaagaacagttggaagctttctggtcccactcagctctaagtacccaggggacaggatgctcctttctctgggaaggttgagtgacagagactttgtctacatgttgttggtgacaaaccagatgggtcttcacattcacttagtggttctggaattctggaacacacccagcccatggggtattctttggaatgttagttccgtgatgatggatgaaacccttcctgaggctgtgggagtctcttaaacgtctgtacacggttctacagactctcgttctgaacatatcactatattgagatagatcacagactaggcacatggtctagaccgatggagaatggctagccagatggaagaatacaccaaggaaaagatggacatatgagctctgtggaaagctgagtctaagaacaacagcatacatgttcccagtggctggaaaagagcagggaaggatggatggtttgagtgacaggaagttgagcgaggtccaagtacctgttggagtgggaaagagcgacgtttagctatagattgacttgtggagtgttgtccacagagccttatggtgctgtctgcctggtttcttctgagacatttcaagaactgaccagaattaaaaccacagtgaaaaagtgtttatcatgtgcaaggcaattttttttttgaaaattaattccctcagtctgttcagcagtcttgagtggacactgctgttctcttcacttgatgatgtggaagctgatgctgagaagtgaataagccatgttgctgcaaaaggagatgttggggtgtgactctagcagctgaccctcaagtctacatgacctcttgtttccccagttcctggagggacattgtccagtctgtagagagccaggaatttccttgtgggattagtgcttgagttttccctccatccacatgtctcagatcaactgaattccctcccagaactcaatccctctccttaaacatttttaatgtttaattacacgaagttcatactgaggtttgctggaatttattgtatcatttggcttaagtataaaggcagctatgtagctgtctcaatactgcaatgagggaaaactttaatgtctgaagagctggcaaaatccctagccagcattgcagaggaatgtattttgccccattgtcttctctggtgatttgagttgtgggttgcccgtgtacctgtccatcctttgactgcaagggttgcttcctttatgccctctggaagagactgtggactttttctgtaacttctgggcttgggtttcctgttgagaaagcactcagacacacacacagacacagacacacacacacacacacacacacacacacacacacacacacacccctcccttgatacctcagaccactctttgtgtagcctctcctatcttgatgcttagagaacctccttcttttaactaattaacgcccagaaattcaaaccatcttaaccttacaaacgacacacatttcctgttcctctaatcagctgcgtcttattgcagtcctctctgaagatggcacagatggttcagcacatgcttctgagaattgtcagtgaacctgaagttttactgccccccccccccaatctgcgtcctctcatttgaaaggaagatggaggatgacaaaggaacttgcctggttgggaagggggtgtcttgctgatttccgggtgcttaggagttcagaaaacacagaaagcaaaatgcccatttgcaaacaagcccggtttaatacagcccagagactgaggcgggattctcaggggagatggtctgtccagtttactcctcagtcaccggctgataccttccttgtttctatcacttgctgagctcaagcaacgcaccacaaacagatctattgaaggagtaaagagagagacagcccctcaccccagagacctatgacactgggttttttaagcactggggtgtctgtgtgggggggtgggtggtgagaaataattaaccctaaagaagagagtctcacaatgtggtcacagctgtcctagcttcctatgtagagcaggctggcctggagctcccagagatccacctgtcattggctgccttcgtactgatgttaaacatgtgcactgctatacctggtaggattttttttttttttgagacaagatctaatgtagcagaggctgaccctgaacttgctgtgattatgggtatggtccaccctggccatcctgtccattaactgccccactcacaccctcacccccaaccaaagcttcatcatttgaagacccacttgggaccaaggagataattatatggtcttttttggcctgaaggcttagaactcagcaaggtctttgtagtctgttcttttcctcatttggggtttctaaacatcctttaatgggggaaactgactctacaaagaggatcgtgattttcactggtgctggtaacatgtcacctttgtagctaacactcagagtggaaatcttacgttctgacgagtgaccgtccagtgacacagcttaatcacccagggattggtatcttggatgccatgcctctcctccctggtcccatggacggccctctcctatttttactcatgagataagagaagcggaagtgaaagtttctgtctgagccaaagagagtaagggagacgctgaggagactctggggtgcggagagtttgtctccggtgctcaccggctcttactgcagtgcagaagagtcgagtcttcctctggatggaaggggctgctctttcccctggttgttttctgtttgccatggttgtcgtgggagctggagatgaggctcagcaaggggagagcttgtggagcaaacaggagaacctcaatgtgatctccagcacccctgtgaaaatgtcaagtgtggtggtgtgacatcagtgtgtgacatcagtgtgtgacatcagtgtgtgacatcagtgctgggaaggtggaggcaggaggatctctgggactcaaaggctaaccagcttagtgtacagggtatgtgattcaggctaatgagagacccccacacacacccacacacccacacacacacaatacatactcacttaaaaaaaacttgccatggtggcccaccctcctcctccctccttccttgcctctgtccttcttttcttccttcctttcttccttcctttctttctttctttctttctttctttctttctttctttctttctttctttctttcactcctctctctttctgctatgttgggctattttcaatattacagggaaatctattcatgaaatgccctttcctctgtcccctactttgcacattgggttcatttgcttgggctatcgtaatacagaacacacacactgaggtcttcacggatagcagtttattttctcacagccctagagcctagaagtccaagaccggggttcttagcagattgatttcagtgtggtttacagacagaggccaaggccttctgcgcgtgctctggccaagtttctcatctctttctatcagattagggtccacgtctgtgacctcatttaacctcatttagcccaattacctcttgattgaaaaggccctatctctaaataaggccaccttcttcagtataggaggttaggtatcaaaatacagatgttctaggggacacagttcagctcaagaggatgcccgctgtacctttgcaccataactctgtagttctagaccccctgaattatattcctgtgtttctagaacccagcacacctcagcttataactattcgatgagtcaagaattggagcaaggcagggctttgttctgctgaactcatgaaactatccaagcaaggcccgcacagagctgacaaagctcagcacacatttgtggagcattgctggctgggtaggtggcatagacatatgaaagttcaaggcacgacagaagaatgtgtctcaaaatgttctaagtggtgagaaaacagggatggttctgttgtggttgttgttggctccaaggcttgaagcaataatcctaagtggaaaatctcatagtgaagacagcccattaggacaaactttacatccagcccttgtttgctgcatcacgggggtataaagattttaggtcaagtcatttaggtagacactgcatttttatctgttagttatattatttcatgagcacgcatgtgttgtgtatgtggggctgtatatgtgcatgtgtgttcacgcccatgcacatgactgtgggagccagaggaggatgctgccttttgttctctacctaattccactttattcacttgaggcagggtctcttactatacctgaagcttgccattttgcctagactggcttgtagtaagaactttggtttctttaaaaaccaaagacatattataagaacatgttttcattcaatcccaggtgtggggtatgggactgactgcttcggattgtccacagcagctgatttgccttgtcctctagcaggggcgtggtttgccagctgcagatagtttccacgagtatgtgacatttggaattctggggactctttagaagatatagaaatgctagggccccaataggccatgtgtgggttgttggttggttgcggtttgttaagtagtcatgggcaaaatggaaataacaagaagaagaagaaaaaaaaatagatgtcatgatgttgaagaccaaatttgccctaaggaactggatgccccttatcagcaggaagcagtctaacaataaagtcaccctccttctctgctacccttctctctctcctatctagtgtgagggggtggagaagggtggaagaaagaacaacccacaacatagcaagtgtccagatgtactggctagccagtgagatccccagagtttaacacctgcttctgcttctgctgtccccagttcgggagtcacaggcatacatcatcatgcctaacttttacataagtgccaggagatttaactccagtcctcacactagcaaacaagccgcgttacccaccgagccacccctccaaccctgacactgtagttttaaaatggtgattggactatttatagccatgttaaattcttttattcagtagacacagtgggataatgctgcctttccttcacttaaggcgtagctgcagaggagggggctgtaaaaccctgcattccgtgagccaaagtgctggaatctatttaactcagggtaccaaggtgatggtgccatctcacaggagagcacgaagccctttgtctctgaacttttcaagtaggcactttcttttttggctgagattcctgcctgcagcaattccttctgtgttcatttgtaaatagccatgcctaacatttctgtgatcccttctttggagaccttaggttattgggaatttccagattggaaatttttataattcaaagagattggattcaattttcacaaaccagagatttaccaacataatgaatcatgtggaatgaaatgatcaagagagacttggatttcttcctgatgtcttcagaagcatcatttacatatggtaattgctcacctgactcagaggcgagtctgctaagaactcacctgctggtccccatcactgtgaagactttaaagaagaccatgatggagtcattttaatgcatccttggtttcttcctaggaacctgccgttataattatggcttattggagggagcattctgtccccagttgagccacgcaataacattatgcagggaaaaaaaataagcacacttagcactctagaatcttccgtggatggctctaattacacggggagcacttgtctggcttgagtgtgttttaagaatccagtccttcaagtagcactgatgtccggttttgaaacagcagtgtgctgcttcaccacggatcctcctcaggccctgcgtacttcagcagacagaatcaagtgcttgtgcttcagctttgaagagcaccagaaaccctgtttattaaaacagttctctttggcactttgtagcattaggataatgcggccttagcagaggtagagtgtctcctgaacacttaccagaaggaggattgctcttccccacagtgccctgcctttctgaggatggttttttgtttgtttgtttgtttgtttgtttgttgtttttatttgcttgttttatccatggtcctctttctacatgctattctcccctcctccctctctctgtctctctgtctcagcttctctctctctctctctctctctctctctctctctctctctccctgttgttgaagatagggtctccttatattgtccaggctgtcctgaaactcactgtgtatcctagcatggcttcaaccccatcatgatacaagacagggagccaatagacctgaagatcacagttcccaaggcttttgagcagcggctttcaggttcattgtttcatgcccaagaagaatgataagtgtgggcaaggaataaacaggaggaagtagatttattaagaaaaattcctgagtgggaagtgttgtcccaagacacatgctttcagtgggcccttttgtgaagtggatagaggctgattggtaattgatcattttttgaaggcatcaaaagcttaacttgtgaggagcccacacaccttctgtatcctcctaggcccaagtgaaggagtgatcccatcatgcattgctcctcccaccatgcatcatggtcacctttgtcagctttctctcaagtcataagccactgacttggtcacttcctttttctcttctaaaacagtgcgactggcttctaatctatcacaggctcctgttgtcgcttcctgtgagaagctaactcctgtctcattggcagcttctgtgctaggactgcatgcctgcaccaccacattcagcctagagcatcttcccagagagaagaaacagcaggtaccctggctgtcaggcatgttttctgtagtgctcttatcatacagactcctttttagacattaacacttttagctaagtggtggtaagaagacgactctgaaatctagcagatcgacttacaacaaacagatctgtccatcacttgagtttgcctaactgtctccacacgcggcctccagggtgctgcgcaatgtttccgtgcttcttttgtgcagaggggtctagtaacatgtattgtatgtgtaaatggttttaaaatgtcactcaccaaataatgcattatgactgctttgtggccaaaactattagagccaccaaaagctgctgtatctatccatgctcaccctccttcctccttctactgtgggctgtcacacccagcaagaagccctgcttcacacccctccactgtcgtccatccacctgcccccccctccatcttgctcatctagccaggcgttcacactgtgctgtgaagagaattactgtttgcagctccttgtgtgggggacatttatcaactccatgtcaggctgtagtttgaagtcttttattttctctgtcagcttctttggtgatggttccctggcagttcctccaaagagcacaggggaaggtctattcataccactttctaggaacagaaagatagagttgcgtttctatcatccatttcctcaagttggaagcaaaatggtattgtgatgaaagcagttataagcaacttacaaaagaaggcatgtgtcctctttttaaaccagtgattttaacatgcatattatttgttcgcaagtaagttatcctctggaaagctttgcagtaggctgactaaaatataagcgatattaatttgttggaatatgaatgatctgccctttcctctttcttgtggtactaggggttgaagctagggccttgctaagttctaccattgagctgcactctggtctcaaaatggtttgaggggctgatgaggttttaggaagagcaagaaaatgactgaaggccagcacagtggcactgtgggtactttgtccttgtcatggctctgtgaaacaggcctgtgatcctggctctgtggatgaggagcatgaagccaagtgtggccaagccattacacagcagtatgtggctgagctggccaggaggctagccctactctcccaagcccggggtacaatggcttgtttaatgtctacagaattagggagcaagaatgatgttgttgtcagaaggaaaggagggaggacatttcaggaaagaaaagaagcaaaatgttggaggggtggacgagagctgcacatgagccatgatgctcagggcacagtgggcagacaaatccggccggaggagaggctagcatcaggctggggaggaaaggcaagcgagcagaaggtcagggcctccgccagacaggtggagacagaacagttgctttcatcacctgggagggattttttttaaccacttctgaggacaccttacaaaggcgaccttgaagtttttcagtgtatgttgtacacaagagcaagattgtaggtcactgaatgccaactgtgctgctgggcaggctagccttaatggcagaaatttcacaacatctactgggaagtgaacggcagtcagtgggtactgagagaggaagaatgcgttttcttaagggacaagtctgtgataggatgtgttatccatcccaagtggtcatccctaacacatgcacatagacagactcgatagggtgcatgtatgtgtgtgtatagaggaaataatagtgtcatgaattcacgagtgacttaggaagataggagggggtggattgggaaaaaaaagtgtcagaaataatgtaaatgaggtactcatgtaaaataaaataaaattctttaatgcatggcaaaaactattgcagatcatgccactaggccagacattttccttcaaggggccaactttgtccatgttatttgattttggacaatcatgggaatatggctcggggtgggcatataatttctgtaatgaaggagaccacctggcttatagaagaagtccaacatatccactgtcagctctccagagggtctatctgctgacctctggtttcctatttatttacagacaaagcctctcacatgctggccttgtttagtacataatagctggagtttgctgtgtagacaaaggttcaagaggccagccatacagacaggactgacagtaggcacttgggagtcaagtgcatatctcagaagttaggtaagaaaggatttctaagaatgattgtcatattctgtgacttttcctggggatacatgaacaaatgtgaatttaccttagactgggaacaaatagaagaaaagattccactcaagtttactgtggagagccagtaaagttcacgttactgacagaggtctggccgacatgggtaccaagctatatctctggaactccccgcctggtttgcaggcagctcccttgaagaatttcctcttcaccagctattactgctaactgctgtaataactctgggggagggcctgggcgtcttatggttttcttggaagtttcctgtgccaaagctcttctcccaccttccatctaggagataactttccaatctgaaggaaatagctacccaacatagggagtctatgatgtcaagtgtacatttattggtgttttaaaacggtgtggaaaaccaggaagcaataggtgcagaaaaagagagacctaattaaaaaaaaaaaaagccagtggtcagatcagtttatagccatgagttagaaagacccaggcattccagctgtgaatgtaagatgtggcgtaatggccctagatatagaagttaatgtgcaatcccacttgttccagatgaagttaagtaaaatggcttgccatcgtcctttggctttacagcctctgtgagtcctgtttctggcccctgatgctatgggaatgagactctccctttatgcctgtttgactgttcacgccttatttttatgacctttcttatcataagcaacccatccccctatgcaaagcccatctatgttcctggctccagcagtttccactatggctgctgctgttctgagcctgtgggcccccctgccaagctcaagagcagggataggcaaggtcagggacacagaagcctgaggtgggctgggccgtgggggaggagcgtatgaacaaagtcgggatccgctgaccttaacgtgcagcgattccagctacagcatggagccttcttcaaaaccgctaatgaacaggtgaggtgaggcgccagaggaagacagagtgagccaaggatgatttattccatcaccttatgggggaaaggcggttgacatgacatcagaattcaggggggaaatgcacaaggcgtttcaaaagaggctgagccttattccagaaaagtaaagctgaaagttttgaaaggggaggcagctgctagccacaggtggaaggaggagttagaggatcaccagagaagtcagcttaaatttaaattgtatcactggccacctgaagaccgtaagagctttgcacacacattgaattagtaacagagtctcagagataaagccataggccctgtaagagttccatttgccatcactgtctggtccttcttcacgatccaagatccctgagtagggacacctctgattaggttcagcaaacctttggcatacctttaggtatacaataccccccctcccgtaaatatatgtggcattaaggtgtcttaccacgaattttagagggcatatgtccataagacacctctgacagtctagttcagtgtagcacatcctccttccaaaacaaaaacctgtgagctagatttgatagtgtttggtttagtagaagtttgtggatgtaggattttactttatagttttgaattttttagcatggtaatataagaatggctttctagggaaggacttgagtttatgccttgtagctgacggaagtgagtgttttctacttgacgagcagaggttactatgtgcttgtgaactctctgccttctagaggagggatctgagcttaactctcactcaaggtcaatctgccaactgtatctatgaagtaagttcgccacccgtcccattccttccttgtctctggggtcatgtaactagctgccctgacctcaccccctccctctgtctccctggaaacgttaggcaaatacatagtggcgtccatctttatacgagtgcacattggatggtggaagtaaagtggacagacaggggtgcgctggtcgagagatgtcaaggtggtgagcctggttgttctgctgatggctttaagaggttttccttgtgttgggagtttgtctagcgtgtgcgaggttctaggttgaacacttgatgccacccccctaaaaaaaaccctcactcatttttttttcttaggtataatagctattcgcttataatctagacagtcaggctgggcaggaaagttacttgttcagggccattgctaggctcaccccagcaacaacatcagcctatgaaacttctgctctaccagtcttgggctgcgagcctgtgtactgagtgagcgttgcctctgtttctctggtctgagcagtagactgctggttccagcaagcatctttctttgtaggctgcaaccagtaatttgggtgatgctatttgggtgatccttctcatggctgcacacaccctgatgggcttctcctgatggcagctgagagccttcatcccatttgaccatcaaatttctttaatccttgatgaaatccatctggttattcagcatggaaaagaacaccctatgctctgttttctacattccaagcccttgagcctcctggtttggggagtgacaccagacacaggggctgagcgtggaaacagcctagcaccgccagccctggcagctgtccctcctctctgtaacttaccagaggggcccccgtcatgcctcgggctccaggaaatgagtttagaagatccagcatcttcaggagtggttggaagcagtacacaagctcatggcatcccagaaaccacctgccatgtcctaccttgttcatcaatcagtagcctctctatgaagtattgaaacctgagtctaggccagaggggttctgcatgtccacggggatcattctgagccgcacaagggcttccaggctgccagtaagaacttgatacttgcttatggggtggacaacacacaaggttcaaggttattgttcacctccccaccatgctgttaacttgtccttgtagattctgagggtagctttcagaaggccacatgagagcacgaaggatggctgaaggctggagcgcagagtcataggtggctattttctctcagtgcgatggccaagcctgtagcaacatagtttcctgacttctggtggcttcaattctgtcagtaacctcttaccttcccctgcagagaggaaaagcctggcctgctgatgggtaagaggctaaccaaggaaaccacagaaccctggaaaaaatggttcctaggaggaatctgctttgctgaagcctggcttaggcctcaggtttgcaaaaaaaaaaacaaaacctcacagccatgcattcttgttcacactggaagatttagtcctgtttgtgttactaataagcagttctgagaatactctggtccctttatgggtgtctgctaatttgctgtccttctgatgtgaggggggcagaacaatgcctttgaagttacccctgccccctgtgctactggctttattgttccagatgcttccagacatttcaaactcgcatttttaatatgcgttatgagatgcgatgttcatatttattagggccacttaatagcaacggaaacgagcccagtgcagctgtgccagacaagagggaccggcctgttctgtcccttttgcttcttttgtttgctacttcagatcccttcgtacttttcttgacagaatagacgttgttgttgttgttgttgttgttgttgttgttgttgttgttgtgggaagttgccctgacatttccctttgcctacgaggaaacagtttgcattctgttgcttcctttcgttcctgtctgagctgggaagaataaagctcgaactgcagaagtttaggcccagcttcccagaggtctgcagagaagtctgtgttctggggagctgtgtctgtctgtcccaggcatgtcctggccttcctggtacatgtgtcctcttcttctcttcttcctcctcttccccctcctcctcttcctctacctcctcctccttcccccactcttcctcctcctccctcctcttcttcctcctccttcccccactcttcctcctcctccctcctcttcctcctcctccttcccccactcttcctcctcctccctcctcttcctctccccctacttctcttcccccttctcctctacctctnnnnnnnnnnnnnnnnnnnnttcccccttctcctcttcctctccctcctcctcctccttccccccctcttcctcctcctccttgaggagctgagtctggagctggatgagtttgtagctcagctgtcccaggtctccggtactccacccctccgctcatgctgtttgcagcttccactcttcagcagggcagaaattaaatgcattagcactttgtctgaaacaaggccaaactggcacccagtaaacctgaccggtcccatggaaagcacaagtagtttccctctactttctcatctgtttgtttgtttgtttgtttgggctcagcatttcctgagcattgcctgacagggcaggcagtactttcttcacatctctagcaggcgagaacacttttatgattcacatccaagaacaaggccactggtcagcgattgaaacaacacgacaaatttattatttatgtagggaagggagtgagtctagtgtggtgggcagcttctctcagcagagctgagaactgatcttgggtctgatttcaggaagcaccagttaaggcctggtcaggctttgggagtgggagggagtggtattggtgaggcgactgggcgagcatgttgccatgcagaagcctgtgcactggtttccagctgtcactcgttggaatggtagttccttgttgccatgactacaaatcaggtgagagcttcttcccctgaagtcatgtcccacgtccatcacactttttggtgttttctcgggcaaagcttctggcgagccctcagggagactctccttagcaggtagttatccaatctccttcctgctaatatttcatctgaagggctctggtttctgtttgtcataatgtcagatggttaggggagccaagtggcttctcttggttcctgaatttggtcagctcagaatcttatccttgcagtgtctctagatattaatcatattgactccagggactggtcctcaatcatgtggtctctgggtgcacagcatataaattttgtgcagcagatgctgggggtgttgaatttgtcgtgcttctgagaaaggtgagacgtttgttgttttttaatctcaactctgagaaagttctcttccagaaacttcacagtcagcctcgtagggaccttccattaaatgacaagaattcttgaggagtcaggcaggtataaggtgaagaaatgaaatgtgattgttctgagcaaggctctgacatgtgcaggtgtgtgtgtgtgtgtgtgtcctccatctatctctcccctctttccttccatcaaggagaattctgaagattaatgttcccacgactgtgccttctccagaggtcacactacagcagcatgtattcccagtagtgtgagtgcagcaaaagaacccagagtgccctccaggccctgggagcattcataatgagattattgccttccctggagttcctatgggcacagtccacccagcccgtttctccccctgggagtttagctcctcctttctctgagctgcttaggaagagaggctgctggtagtagaaggagcttgctttctttcttctctttctttctttctttctttctttctttctttctttcttttaattagatattttcttcatttacatttcaaatgctatcctgaaagtcccctataccctcacctctgccctgctccctaacccacccactccctcttcctggccctggcattcccctgtactggggcatagaaccttcacaagaccaagggcctctcctcccattgatggccaactaggccatcctctactacatatgcaactagagacacaagctctgggggttactggttagttcatattgctgttcctcctatagggttgcagacccctttagcctccttggttactttctctagctccttcattgtggaccctgtgttccattcaacagatgactgtgagcatccacttctgtatttgccaggcactggcatagcctcacaagaaaggtcagggtcctgtcagcaaaatcttgctggcatatgcaatagtgcctgggtttggtggttgtttatgggatggatccccaggtggggcagtctctggatggtccttccttctgtccgagctctgaactttgtctctgtaactccttccatgagtattttgttccccattctaagaaggaaggaagtatctacactttaactctcatggagaccctacagctgccagggtatcatcagggccctcatgggcgtgagctaggggtggagggtggtggtgattgtgcagtgggttctactccttggagagcagataaagactgcttcttcttctgaaccacaaccacttcctatcaccagggcaggctgtcacttctcctattaatggctgcgatggaagtgtgtatggaggcaggccctattctcccggactctcccaggagagttatcaaatgcagtttacatcagcctagcaaaggcatcctggacctccgattttcagaggccccagaagaacaggaaatcggtggacttaaatggtgctttgttgagggtagataatgcactgacccaaccctgtagactctccctgtgactggaagcaggcaggggggaggaggggagggctcctcatcttagcagaagctgaggccaatgtttcttcaaggatctccatttctgccatcatctcttgcattctgacagtctccactttccctgggtgagcaagaagcctaaagccagagctgcagccactgttgttgtcctaggaagtcttcctgatactgccttctaccccatggttacagttcagttgtaagctgtgtggcttaaattctctgtgctttggctaaaattataagcacctctgcttatacttttaaaattcatgctaatggcccctcatattagcactgtgtcccctctcatagcgtccctgtgaatgttaacccagtaatactaggtaggtgctaagagccttcctagaacagagttgtcattcagttaacgttagcaaacctatcaccactagtgaatcccactttgagttaggatgttattcttaggcctcaaactcacccttcagccttaatctctattttccccaattctaatttttaaatgtatttggattttagtgtttctatgcttctgggtaatctttaattatttgtaaattgtgacgggtccttttgattgcactgaagatgtctatgaggtgagttgtttccagagacagctagctaccatggggtgagagcctccctgaatgtgaacagcacccttccctgtgttgtgggcctggatggaataataaatgagctggaagagaaatctccttagcgttggcctcttacctctgtctccacgccccctccccagatgtcataatgctagctgtctgctcttccaaaccatccttgcctggatggattgataccttcaaagctatgagccaaaaaccaaatgcctctccccttgggttgtttctgggttattttgtcgcagttgtgaaagtgtggctaacatatggaagaaatacatgaatgcaaattccaggctttctccagggacccagtacacttgaatttagcattcagaacaagacagaaaagcatgaaagtccagaggggccagtgctatgtctagagtctccagcctggaaatcatgtgctggctccctgaagagcacagtgcattagtgattatattcccccaacagtccttcttcacttatggccccagcactgtatctcacagacaaacttctcggggaaaactgggatatttttcatttcttactctgagctctttttaatttgtagtttatgttgttaagaagaaagtgtaatgctctgagactaaagggcttcttccaagtagtgttttgccacctgtggagatggtacctgtggactaaatgcctagcaactgtggggcatgcacataggcaggggatgacaggagtcacctaggaaactcacccctgtcccgtgagttaacaactaggctgtttatataccactagcctttgaatagagggactgggctttaggtgggatgtagaaggaccatctataacttcaacggggagagaactgttatgtaataaaaaatgtgaaaagatatattcaaaacaagacctaaagcctgtggcgtggttgtcacgagcaactgtgaagatgccttggaagttggtgatttttaagttggaacggtttgagtagcatcagtacggggagtgatagcactgtagaaggtgggtgttcgaggtgcctgtcatgaacaaggccagaatcacgaaggctgggccgcaaggtaagagatgtaaatttattactgcagcaagagaagactgccagagctcctgagtatacctgtgctggggtccatccgtggggagtggggtggatggatgtccggtgaagatcggctgaaagctggtaaggagggatttagcaggagcactactgggactcctaacttctgcttcagaccttgtctttaccagtgactagctatgtaaccttagccaagtcaacctctctctaggctttaatttccccttttatacaaagacaatgatgagagttttgcctcatgaggcagttacacaagccagatgggtaacacgtgtgaaaccttgaaacagctcctagacggtagtaagtgcatggcaaatgcaagctcctttattatcatcaattgtcatcgtactgagagtcagaaaagtgggtgtggcagcggggggggcagtggggagaggtgaggataagatgcagagaataaatcgaagagctatggctgatggaagtcagagaataaaagattcacccaaggaagtgaactctgaggctgataggcagagggccaatgaagaagatcaatagagtgccacgaggaatacctctgtggacggggagaggataatgaacccaagaaagatacagacgatgaaaaaccagagaattaggggcaaatcaagagcatctgttgtcatggaaaccaaggaaagagtcggcagatacattgagagttgggtggagattgagggtaagaaatctaccacaaatgggacctggatattatttaaaagaaccgaacaatttggttgtgggatgtttgagagccatgagaaattgggatttggggccatgatgagaatgataaggaacagatgaggtggcatctgaggaacagcaagcagagcaaatgaaaagacacacccaaaggatggaacatccaaagaggacaaggagatgtgaagtaaataggcctgtcggggtgagtcgggcagtgctggtgtattgcatacagagcaagaatgagacgtccgtccctcctggggagaacgaggagatagggattggtagagtgaacttacagaggaaaccaaagcaagcattggccagcagtcagattctcggactatgtgtgctcatttgggtgcacacatgcctgtggaggccagagactgatgccaggcgtcttccttgattgctcttcaccctgctttttaaaactgggtttcttgctgaagcaggagtttgccagtgaattcagctgctcacctgctcccatcctccccgcattgcggctgcagataaagctgagcccagcttttatgtgggtcctggggataggaacttaaagtcatacagtaagcaccttagcaatatagccatcccccccctaccccccaactcccgaaacagggacagcagaaaagccaacttacatgaaatttgctttctgaaccttgcccttatcctttctactagtaaataagttttccgttcctaatacacattgggaaaggggtaacttacagagttctgaaatcctctcagtttgaagaactgtgtcttctaaagaaggggagttgggtagaagttgaatgcaaaggccgttgctcaagtgcataatatgtgttgctcacagatgaacctggcatggcagcacctgcttgcttgacttccctaagcccacttatgaatagccatgagattttttttacagggcttcacagtctcttatcatgtctctgctaaccagcgtgaggtccctagtgtcggaggtttgcagaaatccaatgggaggtctgggacctttgcttatctcattcttgtcaagggatctgggaggccaaggtgtgtacactttttagctgcagctcattttgttggagagtggctctgccccgtttcttatgtgaccagggaatcttccatgcagtcgaccttagaatcctatggagaaaaccagtaccatcattttttctaaaaaggaaatagatttattttggtctcctggaaatcctataataagtacatctgcttcctgctgcttctagcttccttagatccctctaggagagcacttgtgtggtacgcacatgcattccatctagacagacatcttggtccatgcctccccccctccctgcacacaagatataccaagaaaatttatatattttttgcatgaaataccagaagcactgagtcctgaaattctaaagagaagtgtttaacatctgagtggttatgactatatatcaaattgataaactccaatcactgatatgacttatgagttacatagctggaaacaatcccaggctccatgcttgatggattgccctctacagacttggatataaaaggacccctggtctcgcatagcttaaagatttgatctaaaacatatcagttctaagagttttcatattttatcagctcggttacttggctaattcggttagttagactgctaggtagccaacaaatgttcttcaagctctgaatttctcagctcctgtgggagacaatgaagttcgattgaaagttgtctgttgctcttgcaacacacacaggtttgcaggtgggcagccagcaaatactgcagagtttccagccctaacagccacgaatggcatgaagcctcctagagcagtagagatacatctagttgggtcacagctcggcttgattcgccttttttgagggttcggcatttaaaccatgactgtgtgggagccagcaagagcctgtgagagacatagggtgaggtggcagtgtggcactatccctaggggaccagggtggttcagttcctagctccccaaggtttgtttatccatctatctgtaattctggtccatgagagtggaccagcttctctttcacttagaaactgcatccccgtctgtttgatgcaaacagatgttttaaaacgtgtcttgttttcatatgaccccctaggctcctctctcagagaagatgccattcttgtgtgggtggtttcaaggtcaccttgggacttggatgtggaatcagggattggtatctgtgagccaccttcccaaggcagccactagatagtgctgggtttcaacatgaagctgattttcatgtttccagcatcccagatcctattaaggtgaagacagagtgttccattcatactgacatgactgttccttggctccttgtacttcctaggtcaggggagatggtttatcattcatttctcttcttccattggactggaactgaacactgaggctaaaacttgacctcagaccccggcgctcagcacatttaagtgcttagtcaacgataaaacatttatttttccaatttatttttgctttgtctctcacacacaagtatgctttctcttctcccttttgagataactgtgccacagtggtgtggccgggagtgcttcctggatctctatctgcccaagagccagtaacaagtcttagatttttgccaagcgtaagcaaatgcacatgagaatgaccatgtcacctgccctgcctgacagctctgtttggacatcagctcacatgcatggactccttttgcagggagactaaacatatagcatctcattagagttcgtgggttcctattggctggtacaagttctacttcctaggcaaacaactgatgttgcaagctggcaagaccgtggtcctggttggatgaggtgaccctttctctactgttgccatgctgggctcctccatggtgaggaacaggcaggctctccctgactgcgttatgccttaagtcagaagatgacggcagagctaaatacagtgacatggctgccactgtcacttttggaacgggaggctgcagaacacagtcagggttctcaggtgtcactgtgctgttagcagaaagcctggccactctggctgtggagggtccccaggagagtctggaacaatgaacttgactgggtaaaatgtttaactcattaaatgggttaaacacttttcctcagctgcaagagaatgtctcagttatgacaagtgacatggtatggcttgctggggtatgtgaaacagtcgatgcctgttgggcagccttccctgaaatgagaggtcaagtcctcagtcactgacttcctcctaaatgttggccagggatatgacttgtgtggcccatgtaacacaaggggcaaaggacacagtagatggcaggcagggtcagggggtgtggggaaggttcaggtatttattaaattcctgactacccatgatctaacgagaaagaatgccttctcgtttttttctggaggcagtaaatagggcctgtggtgtatcagaggaatggatatatccttattccactagaaggcaaaccttctctgaatgccgaggctggagcagatactaacaagctttgaaacaaaatgaactggagttgggaccatgccttcttcttacttagcaaagtgttgtatttttttttctgagtctcagtttctaaacttataaggtaggtaggggtgtgtgtgtgtgtgtgtatgtgtgtgtgtgtgtgtgtgtgtgagagagagagacagagagagacagagagatagacagacagacagacagagagagacagagagactcagagggacagagacacagaggaagagagagacagagacagacagagacagacagagacagacagagacagagagacaaagacagagacaaggataaagcctagcaggttaattacaaaactcagaggctgtacgtatatggagcccctgacattggggcccccgcacacagcttgttcaggcagcttcagagagaagaagctagtctgtaatcctcttatcaactcaagatgactgtgctctggaacttggaggcatctcacctgatagtgtgtctcactttactggctagaaatagtttatttctcaccagcttattctgcggtggattggtgtcttggatttagtgacagccactgtcaggtcacttgttagagaggcttctttttaaggcatgaccagcagcgaggcctcagggtctcagccccctgcctctggactccaggaacctcgttgcctggcccataaagctgcgcatctctggttttctgtggagaactgtgttgctcgtgaatcaaggctttctcccttgtcatctgtctacgtaggcgcttaattttagcggtcgggtttgcgaattatttgtggagaggtactcccacctcggcagcccttgtttgcacctggcagagacaataaaacttccaagagcaaaatacaattttcttccgcatccttgtatcttttcttagcattttagaaaaccctactccatttctggagcgctcgggcatctttctccactactcagaatgcacagcgcacagatcccatgcagcgccataccgcagacctgacccagccgacccagctggaccttcgaatgtctgcatgcacaggcgctagagttcatagcatcgtgcccctgatggggtcacctgggcatcacgtctgcagcagtggcccagggtggggcttctcaaccaagcccacttcaccagctgttttccactgcggagagagcaacttcctggggtttccattcttactcttcaggctcttaggcatgttaggcggaacccagacagggctgcaagaaaatgtgtgtgtgtgtgtggggggggggggaactcaagctctacccccagcagaggaacatgggtcatttgttttcactgtcagctgggttcagtgggtctaggctattgttgacacacaagaaggtgaaggattgaaggtaagagaccattgagaacaattaccaattgcctcaaatggaagacttcctgacggagtgagtgataaggagggatcccgattattagattattcaggcacaggcataattgaaagcattccaggagaagatctaattaaggctggcttctcagaaggctagaacaattccacatgaggcagagataacgctctagctgtggacatcgccagggccccagaccatgctcgcataggcctgccccaacatcccttccttcattgcttcacaagcaatgcctggtgtgaatagcatccatgcgaccatacgatgctgaagaaggtcgcacagtggtgtgctttgaaatgtgtgtgtgtgtgcctgtgcaaaggtcaacatggggtatgctcttcagtgtctctctaccggattctgcatgataattctgtcactaaattgggagctcaccagcttggtgaagcttcctggtcatagagctccactgatctcccatttctgccttcccagtgctgggattacagatgcgaaacagcatgccaggcttcttacatgagttctgaggatggaacttcttgcctgtacggcaaggcaagcactttactaactgaaccgtcttcccagccctcttggtacagtgtttacattatgattaagtatgtcttctgacttaggaatcaggagtaaaggaagaatgtttgagtcccgtttttttgttgttgttttttttttttttttttttttttggctgactccagagatctgcaaaaacattctctcagagacctagaccaagtgtagactctgccactaaatatacaaaccttgcctcagatagatgagcaggcccagtcatctccatcagtgtgcaccttgtagaatcctgtaagcactgttcgcttctgacagactttggggtaccctttcccctctgttctctgacggtggggaaaagtgattgtgacgcacggggtcttctgaccgaaatctccctgtgtttcattgtgtgtctcttcctgagcaactgaagtcccgttctggcttagttgctagtctctcagggtgtgtttagtgcttctgaacttgaggctaacaaggatcattaggcatttatgtcatgttacaatatgtcctcatgaatatggtactggggtgggggggtgggggtggggagagatccaggtcaagggaggggtggatttttgcagctttggtgccagaaaaaaagctgaagttggttttgaaaatcaagatgcctggtagaaatgagtgtgccgttgcagctgcgtggtgctccctgggcccagttaggcaccgtgccacaaaaccgctccatgtaacgagggtggaaaattgggagaaaacagcctctaaatgctggtgatctttagaaacaccctgcctgtatctgtgcctaccctttattctgaggatcagtttatacaaagctttaaatgtagtgatgagatgcagtggggaaagatggagtactctggttacagcaaatgtctgtggcttcaaaagaattcactgtggctttccctgcatcttgacttaatgtgacttatttacaatcaagttaaacaagcaaagaaaaaaaagtgaatcaaacaaacaaatgaaaaagccaactacagcctagatccctttacaaagcctaaggagatattcatgcaatattttttccatccccaaaatgtgcactgggaggacgacgggagaaagatgggaagctgccgtgacatcatcacccagtccacttggacaaggatgctcgaaggcacaaatgtagatcttaaagaataccttgtgcgctggtgagatagcccagctattgtcaagcttataaacctgaatttggtcactggtacccatgtggcaggaggagaacacctgctctttcaagttctgctctgacctcagatgcgtagcccatggcgtgtgcatggtcccagccccatgcacgtacacaaaacaaacaaactaacaatgtggccaaatttttgtcagtcagatgtgcatgtgtgaaatgtgtttttcctttcattgtgtgtgcccctctatgttcttgtgtggacagtgcaaatgcatgcatgtatgtgtgtctgtgtgtgcgtgtgcgctagtgtgtgcatgtagacatcagaggatgacctcaggggtcattctccaggagctgcccaccttggcttaggagacaggttctctccctggcctggtgtgcaccagttaggctaggctggctggccagtgaggtccaggggaatccccttgtctctgcttcctcagtactaagactgcaggcatgcattgctgtgcctcgcttccacatatggaatctggggtgaactcagatcctcccatgtcttgcagatggcagccgaggcatctccccagtacccctttgtttgttttgtgacaaaacacttcaggtagtccaggctggcttggggttgactaagtagtccaggctagcctcaaacccttgatcctcctggttcagtctcccaagtgctaggactactacagactgtgtggttttcatagtacattatagaaggttatgccatgtttgaaaaactctaaacttaaaaaaaaaaaaagtgtgtgagctctaagaaagtatgtaaagaaattgagctgttttcaacagaactccacacccatccctgtgctgacccctttccccaggcagaaattcatcctcagagagcttagtgtggcctatgcgtcagcttgcgtataaagcaacaagcgcagcagcaggtccaagctgctggtatctggcatctaacctgcccagtaagcatcccctgcctccttctatgttgaccttaaggagatcttgcttgataatttaggaagatgctgagtggatgggaccagatcaccctgttcctgacgctgctgtaccaacagctgaacaagatgctccctcaaactgcctcctgtgtctcccctgctgagtgaggctttgggggttgggtgaaagtgaaactcactccctggcctcttctgtagcttcccccaccccccaacccgtgtgttactaatgaggaaggagaggggcgataagttcttgatgatccaggaggcaaatgtatcccaagtttgtcgctgtcctttctctgattttcctgatcattaactaaatggtatgtggatgaaaacagattaaacttggcaacttagcgtgtgatctgtctttcgagggaagcaaagtctacgcattggtccagtgacatttaaatgcttcagccatgcctactgggcgctctgttttccccctcgactgtgagcagaaatgctaatgacagactctgatagaagctgatgtccttggaactgaactccagtcctccgcaggagcagcaagtgctttgaacagcagagccatctgtccagtcccttgacttttgttttgatagcatgtaagccacacatgattgaaactgtgttagttcacagaatgctagtagctttgatttttttttcccctaattagcctactcggaggaaaaacttaaatgttcatattctcacagtgtccagggctggacagctattatggatgagttggttgcacttcgatcatcagagaacccttcctgtaagtgcccaggcaaccgatccccactatgtcagggcccagcagggaaagagcttgggtccccgtcttctgcccacagccctgcctgccagccaagaccatgaatcaaagtctctgacacaaagtcatgttatgaaccctgggcttcctatagagtttggctcactccgggctgatctctaataaagacaaaggccaggggacagaaatatctctcttcttgctcctggcaaataccatttcgatcctgtctccatctcagtgtccagaaaattggattggaaacgggacatcgccggggagtaaatcagattagtgcttcctccctcgcagcctccagcaggcctctcattctgctgagcacgtctctcatttatatgaagttgtttatgacccccctgtgtcacagagacgtttctaaaccgactgaatcagtacaggcagtgggtgaccctcctagccacggagcctagaggattgggcttattggaaaatactgccagtggcttcattttgtctggagaaatgtctgtgtcctcacagctttcgtatagctggacactaagtgacctcaggagagcccccatctgtccctcacaagccacttggtgtctgacagtggcccaggccccagagctgactggaatgggaccctgagtcctggttcaacacaggtgtttccagagtcctctgtgtgggcacttacagagaggatcatctgttctcacaggaacccatctgctgacaagaagtgtcgaggagcaggcagcgcagctgtgtgcgacaggaataaggaactgccctgatgggtgttgaggtttccggttcctcctgagacctttcaatttccaagaacttcttggagtgtttggtcacaagatgcagacgggctctgcttgttttcatggcacagatgcttttaagaacagagctttgcacacttcaatgtaaaattagattccaaaagcccacagatggttctagagcgaactctccttaaccccactcccaggtcagccacagaaccaggacctcacgcatcagggcatgactctaccactgagttccaccccagctttctgaaccccgttggaaccttgggtgtttctccaaagacacaggaactcacccagtccccatgttgtgtgcacagagcccctcactgtttccctgattgcgtttgctgtctttgtaagttcagaagtatttgggaggcggaagctgacagccctccacaccccagaggcctgagtccggatgcagaagtctacctccgctcacttcctactggctagatggccatgggccatggcatatccatgcctgacaccacagagaaggctcccatgaagtcaggaggctccgtggtgaagcaggaactggaactcgaggaggtcccaaggagagagtggaaaccagggtttaagtgcggccatctggtctcccacaggccacgcccatctttctgactgcagcttctacagctggtttgattgttcttgtggtcctcattatccacttcagactgaatgacatgaaagtctccgggagtagacagacacaggcatccaaatatcataacatttttttttcttagaccaaataacaaggctgcttaggctttttagcatctaaaactgtgggttgtgatatcattgtatttgggttaaatttatttttgattgataactccaatgttattgtgcttagctctcagtgttgggcaaaaacccagggctggtgtagactttatttatgtctgatttctttgtgaaactgattcttttctcgtgccctacttttaggatttgaattttagcagaattaatctgaaatgactcagaattatacaattaattgcattcagcttcaattatagtttgcgctagctgagccaggctattgtcctccctggggcaggcacttgcacatggctgtcttggcaggtgctaaggccctgtggctctcccttcagcatgccagcttcctggggaaagttgttcagggctgacagtcttctgccaagtacattgagagtggtaaggacccaggagtgccacggggctgttgacatcagattcttttattatggtataggggaaaacagactgtgatgtaaagggtggaggagttaagacttaggtaggtattgtgggtcctgttatcactgaccatggctggggtcagagaaagagaggggcctcctctgagctcagaggagccagaggatgagaccaggtaacaaaggggcttacagaagggaggtgggaattaacaagaggctacaaaatattgagtgcgctgtggagagaaacattctatgggtgaatcagctacaggtctgggctgcttctgctggggtgggggatatctttagatcagtgtgctgaagtcagggacagcgtgtctccaactcctgctcctctggaatgttcttattttcttcgcaggctgacttcattcacactgtctatttggcaacacatgaccgaattgggagccgagctctttttggcaggaaaagttcattaattttagttggctctccccacccttcacaagtgtgcctggggggtgggaactgcctctcataatcacacagacgccatcccttgcctggacttctaggttctaagatggttctgtgtgtctggctgggggtgggtgctctgagaaaagagaggcccccaagaacgtttcaagtggagccgccaggaagatggttaaatgcagaagcatttgtgagtttatagaccaagaaagattatcctagtatctctgattgtgtaagcgctgatccactgtgccaagctcactcatcctcaccgacttatagcaaacagcctgctgtggcatttggatgaactgggttcttaacgtgtgggtgggagatttccttccacttggaatccaagacctcggggctggaagaaacctaagcgcacgctgcactctgttcatgccttggtgtctgggtcaggcctgcagagcacagagttcatagagacctcttttggaggcatggctctcctcatctgtttgccttccccatgcttccctcctggtttctctgtgtggcactccaacagtgtccttccgaagttcatgtccatgtgtcacctcacaatgtggccgatctctattcagacattatggttggttcctgtgaggtctctctaggtggacactggctctcaactcagtggccgtgacaatacacagaatgtagtggagatggcagaggtagaggttggtatgatgcatgtacgaaccaaagaatgccaggaagcaccagagactgagagggagacaaggaaaagatcctctccagagcttcaagaggggatcagctgagtcagcacttggatttcaggcatctcgctttgcagaactagagagcaacgacgccctgctgtctaagccactggtgggtagccttggaaactattaaacattcctttgtacctcttcatcctctctttgtactttttgatcaacataagacatacattactgcccactctaagtgtgcctatgtccaacctatgtgtaagagctgtaaaagcagttttcaattgatgttctaaaggaggttctataggaggccatgatcgatcgatcctcaagtccagagttgatagtgctcaaaaatccccatgctccctccatggatggcgatgagcctcaagcactgtcatcctccatctacacggtcgtatgtgagctagctgtgtgatccctctgcccctgtctgagatggtttgggggctgactttgaaataagtaagtgaaagaaaagcgaaagaagacagaaactagagaatccccccacccccacccccttgctggcttgctttccttccagagtcagaggcagggagctggcttgagcagagcgctgctgggctgcaatgtatgtccagcctatcttgttgctttgctgatggtcacaccacagcattggatgaatgctccctgtggtagaagagagacacagcgtagagaggtgagagctggcatggagttattccggtggtttatgctagccaggacatcccgggtatgccttgattgacagctgttctaggtgtctagcatgaagtgatcacacctgagagaagtgctttagattttggagcttttagggtttaaaaaatgtgcctagactttatggtttgagcacctgtaatgtgagattctccagaatccagaacttcttcaatgtcatggtggcgcttggtattttagatgttcacagtagagcttctggtcttacatagggcttcttagtgtgcaaggctagaccatcttgtggttgctgctgatgttaagttgcaaccaaagctagctaagcacccagctctagaaatctcagtaactactgaccaggaccattaactagtcagggaagctgccagggtatgttggactcctgtggacatcagttgtctttctgggatgatgggatgaggctcaataccttcgtgggtctattttatacataagctcctctgccctctctcacttgtcaagatggcctggagcaagcagcctgacaccagtgtcaggcttccaaccaagccatgctgggacatctatgatttctcagtcaagtcatcactgggattcaaaattacctgctgggtgagaacataccattttaaaacttgaaggttaagagacagtattgaaataaaaagagagagaaagaaagaaagagagagagagagagagagagagagagagagaggaaggaagggagaaagggaggaaggaagaaaggaagaaagaaagagagagagggagagagagagagagaaagaaagaaagaaagaaagaaagaaagaaagaaagaaaggaaggaagaaagaaagagagagagagaagcacatgttttagaagcacacacagtggtagtgccccttttatcagagtcttgaagtctctgtctttaagacgttggaagaaggttctatgtgaattgttgcagacatgaagtcaactcctaaccttgtagttagaaaaggctaaatactggaaactgttgtcgtaaaaaaaaaaaaaccctagcaaaatattctatatgtgtaggaccccccccccctttaagattagttgtgtcttcacaagtttgcctgttgacattcctgtgttatataatagcaaacaaagaacagggcaggaatgggaggaaggaataccttttaaatgctgactgtgtgcccagcctttgacatgctcatttcaccccaacttatagaggagggataggggcttggagatgtaagataaattgcaaagtttgctatggtgccaaggaatggagttgggatttaaacctagacttttctcacttatattagttgccctggctacacagcattatgtattatattttattatatatttcatatataatttttacttgttctctactgtgataaaatatatgacaagcagcactataggggaaggagggtttattttagctcacagacacattgcagggaaggcacagcacagagtaggctccagcaggccctgcccgcatagctccgtgtcagctagctaggccctacgtataaaaggtatcacagccaccagccggaggccaaatgctcaggttcatgaagccttgctggggggtggggaattatacagttgaagctatagcaccacatatagacatatgtatacagacacataggtacaaggtaatctgacttcaccagaaacgccaaagaacacgctgagatgctatatccaaagaacagcctggagagtactcaccaaaagggcacacggcgttctccatccctgttaataaagtgaagacgtataccatgcaacactcctgggaaacactaatggtgggatcccaggaggccctagagatggcttaatccatgaagcataaaaactttaggacctgagttctgatccccagtacccaagtgattaaaaaaaaaaaaaaaaaggtaggttgtgggaagccgcaaacaccattacaagatggcgctggctaccactggccacagcccatgaatatgggtaaacaaccaatgtgcacatgtgcgtaagagtttttttgccgagtcactgcctggcccgatgcatattaatgaggtactggtagcataaccaatcaagtatggacacatcactcctaggcctatataagcagcaccatttctgggctcagggtctttcgcctatgcagtcaatgctctcccaataaacatgtgcagaaggatcctattgtggcgtcgttcttgctggcgagtcgggcgctcacagtaggtgtgatgataaatacctttaattccaatgcttgggaggcagaggctgaggcagacagatccttgagttcaaggctagccgggctatatagtgagttctaggcagccagggctacacagtaacacagcatcacagcaaaacatacacacacacacacacacacacacacacacacacacacacacacacacaccaaataagtaaataaataataaagctattttaaagtattggtgggtttcattttttcttaattcttactctgttagcttattctagtgttcagttagcgagaatttgtcagttttaaacaccacctctctgtccatttcttccctgttcatgtagagaggcaaggaggggcacccagctgtactctgggggctccatttgcttttagtgcagttattgatctgcctctcttgagagagttttaaagcaaataattatttggggcgtgttagctttctttcagggcccaagtcttgctctgtgcttgtttcctgaccttttattctctcactctagaagcatgcagctcacgcaaagcctgtgagtgttacacagcacacgtgcaggaagaacctgcccggggaccctgagtaatccatccgcaggtccgagggatgaatcattcatgagtgcaggttttccatccagctcacgggctacaggcctgtctcacaaagttgatttgtttaaaaattcacacttgctctgggcttgtttcctataccaagagttgtgttgttttgttttctgagcaagtttaaaggagtgggctcgcttggctccagtgaccatgcagggtgatgaactgaaacccacgagtatcattgactgtagacttgactgtgtgcacataagacccttgtgcccgaagtcatggtcatgaccttggctatatgactatagtaataatttcattggtttgatttttgaaacaaggcctcatagatccattaccctcaagctcagtatgtgcacataggccacggtacagtggacgtcagaggagaacctgtgggaatcagttttctccttctaccatgtagatcctggggattgaagccaggctgtgcggcttgggggcaagtgcttttaactgcacatttgttttgccagtctctaaatttaatttcaactgatgcatggaaccatcaaagttataaatatttggggtactgtgtgattctatgacacatgtatcattgtgcagtgtctgaatagtaaggtctcctaaatttgacttattctaagagttggggtggaggaaacatagcagctgatccactgatgtgtgcgcagagcgcggacattgattatgagcaaaggggtggacagctgcctccagtgtgtgatctcaatttcctacacaagggagcgaattcactgaaccgagacacatttaaactgtttctggaagtatttgtgctgagcactttcttattgtgtaagatttgacattagcacacagacatgcatacagagcacacagacgcacatacagcagcataccggaaacacatgcagagcacaccagacacacatacagagtataccggaaacactacagagcacaccagacaccacaatgacctcagtaagaagccagcagcttttctgccttgcttttctgccttaggcacccagttctccaatgggaagccgttctgcccagtgtttgcctgtggtgggtactcacgctcaggcagcatgaaggtgtgtgcagaggctaaatgtcatctttggatgccctcgattataattctcctccatactttttgagacaagttctctcagtacccctgaggcttgttaatttgatctgtctagcaagtcctggggatctgtctgtctcttggttctttcttgggatctggggattcaaactcgggtccccattcttgtgcggcaagtactctccccactaagtgctaggaaaccattgtcagttctgtaacctgagaaaacacagcgcatctactgctcactgctgtgtgcggaaccctgtccctcacgctcgcaaggattctggggcaagcctgtacctttctctatggtcaatgggtagactttttcagcaatcaagctgcacatgtggaaagaatttctgtgtgggtggaggaaacatctggcagccgagcagagaggtggggactggtccctcatggagtgactgagagcttgaagctcagccagaggccctgtgtatgcgtcatgtgctactggcaagctctccgactctggaagccctcgctggactcctaggcaattgcttagggagtttgggggacagggggcctctgagttattctggaaagtttccaacatgaacagcaagcagctgcctctcccttccaggttctttcgcattcatcacaacacgggacaaacttcttggcaaattattattcatattcagtttgctacattgaacgttacagaaataaataaatcaaagatagaacccatgctgctgagaactgataagtctcccactaaaattcagacatcatttttttttccataaagcacaaagatttagatgtttgagattttaaatgaagttgaccttatttgtctctccagtgcaggggacaacagtgggacctggatcagtgttactagaaaaagcttggcctggggcattccctcccacaggggtcaaggagggaaagtctcagtgggaattcaaactttaacccttcttcttcctaaaagaggctggggatgactcatgtcctcaggttgaagttagctggcatttgatgctggagagtaattcgtttctccttgtaggaaggaatgttcgaattgaaagtaaaaccacactagcacccaaacagaaactgcaagagagggttggtcgcgtggtcgtgcgctgtctccttagcttctctgaactcgggttctaatggtggctctctgcataggtgtagcaagtcttctcattctcccgcctttgagcaacttgcagagggtgaccacccatctcaactgctggtgagagatggtgtggggaggtttttaaactgcagaataccttatagacttagaccctagcattggacatcattattaccttgaacagtcgaggttcagcgacaccaaggagcttgaataaggcattgccctcttgctgtctccccactgcacgctactacagcagattttacttggaatagttattaaatatagcacaacattcctggttggcttaaggtaaacaagcccagtttcatttgtaaacaagagaatcagtggtgtcttactttatagtgagcacaacacgtaggggaacattttttcttgagctcaagtaactatcagaaacagtgcccatacttttagatgagaaatggtggctgagatggtctctcagtggtggagcatctgccctgcactgaggagactgtggtttggtccctggcaccataaaaacaaacaaatacaaattcatataataaaggatgcttcctttgctctgcagagcgcatttgtccagttcctcccctccctgttctcttccctgctgcgacacctttgctcttgagaatgctagcttgctgttcccacattccttctcagcttctttcatatttctgctcagctaaaatacaagctgaagacatgatgcctctcaaacaacaaagttaatcaaataaatatatattttctgttgggtattttggccttaagaaaatgacaacgatatagaatgggcttttgctttatctgggtttgtccctcatagttaactgcaaggaaaggtgatgtataagaaaataagcaagccggaaagcaagcaagctactttttgttgtccgtgagtcaaagcaaaacttcttgcagctacatggctgtttcagaagcggaggaattccgtgttctcatttggtagggcaggctacatctctggctgccaggaacacatctgagaacagtggcttgcatttggccgagcagtacgcttctgaagatgcacttttcttcatggcgaaccagagtggacatctcgctcagggcccaacactgacatgagcggcagacagctgatatctgactttaacaagagcactttcctctacttggttcggtcccaacatcaccctgacctggagtggatgcagcaaggccctgcaaggcatccagatccgagttgtggctggacaaagcacctaccctgagctggtcctgcgagggatggtaggaagctggaagtaagagttgaccctccctggagtccagaagagtggggaccagcgggtatcccactcactgctccctcttacctcccagaggaccatttctctgttttccagattcctccaatgctttgctgtctctcccccgaggaagcatggagggaatataactcagcccaggtccctcctgggctgtaattttcgatttggtcttaatccaagcaagaaggccacagactatggtggggtgccttgtgaggacagaaaatgtcacaccacaaaatgccagggagtctccatagttatggtttctctctttttttcctgtggtcaccactttcaagacccctcccaatctgccccttccccacccctcccctcccacactgtatctggccacagacagattatatttcggcctacccatggcattctgagtatctacttgttaccaacatatttgctgaagacaaagcctgttatgttaccagggcttgctaggaacacatcttcccattcctttcttgctgcttcatagccagggtagtgatttgtttaatgtaggagtaggtgtgatggacaccaaatttataaaagaaaagaaaattattaagtgattaatgttcattagagaaaataaaatataatgaaaacaaacacaacccatctatcagataacagctttcctgtgcccccctcccacccttcgcatgaatcttaaaaagcggaggtggctcagtagttgagggcgccatctgctttcccagagggcgtgactttgattcccagtgcccacgtgacagctcacaactgactctaactccaatcccagaggatccaaccccctcttctggcctccatgggcactgcaggcacatgtacccagaaacacctgtaagaaaaaaaaacccatacacaattaaaaacaaatgaagaaaaatatattcatctctaacttatctgctaagcaactgttctaccattctaattttatgagttagtattaatgatacgattttggaaattagcataatttggctgcaaaatctttgtgaggcttttcacatttatttgcctcccaagctgcctaattctgtcacttgtgctactgaggagttgtttggaaggaggacaaggagccgtctgcagctacttaagctgtaaggataaggatgtgatgtggagtccctggggctttatttctgaaatgtgaacacacaagccactggggtaaagtctataacttatcaaacaggtatttggagctttgtaggggagagaaaaactttgagaatgggtgtgaggtaccctgaagccagatggtcagacctgtgaggagaagagagccacaggaatcacacatgctcagaagtttgcaaagaacctaactggcccagaaccggaagtcatttctcttctgggtagagacagcacgccatcccccgtccacgcatatgcctgctccatgtgttcacgtgtttctttcatttcgcagaattggaaaagggcctgatttgggtgcttaggccaggaagaggctatggaaacttgcatcacaggcacagggtaccagagaaactccccagacctatctctgggctgctacataatgagcccaaaccagtttgcatttttacagagcagaatcatagcagcagttggagctacctggtcgcgcctgcccggccttggggacctgccctgtgtaaatccggtaattccccaggtgttggacaactcaagacttaaagggcatcagaagcccttcatttcaataccaaggattgcccttttgaagcagccttgaaggacttgacattccagggtttaattatcggagagacaagcaaaggcaatgagctgcccctctgaagcaaatgtttatccacttgagtagaagaggaagcaagcgtgatcaatctccagggggagtcctcaagtcagctttctccttgcagagggatggatgggcaacccacacctcgagcccagtgagtgtgtagacagacctgtaggctgtctgaggcagggggggaggcagcctgctccagatctttcctggcctttgagttgtgtgtgagactgacgtgtgcttttaattccatttctacaaagctcccccgagtccttccttggccttatccagaacagattctctccttcctgaaacaagagtaatttttcacttgctgactctacactagttacttttctcattgccacagccaaacacctgaaaacccaacctaaggaagtgtttattccttaggactcgcagttcaccgtggtgaagtcagttcggcaggggctcaggttggctggtcattgtgtgtcaatactcaaatgctggtcactcagcttgcttccccttccccatccagtccaggaccctgccctgtgcaattaacaccacagctaatgtaaattctattagccaaatctagatcgcccctcaacagacctgcccaacacttgtctcttgtgtgactctagatcccctcaagatggcaatcacaggtgtctgtcacacgaacaaacacttaatttcctcaaaattatcctttctgtcagttcctttcccaagagtgaggtttattgtgggggacgttcaacaagcaatacatcactaattaagaccaggtgctctggtgtgtcaaacagcctttgacctctgttctcaggtggcaccagggattaagactctaccctaccggatggctcgctcctttctgagagcctatggaggtggccagcttggatattaatagtgtctctcagtaaacctggaactcactgactagactggccagctagcaagcgcctaggatttttctgtcccttcggtgtcccttcccattccccggatttgtgtgagtactgagaatctgaactcaggttcttatgtcacatggtaggcaccttacccagcccagtgatttcttatatccattcaaggagcgcgtttaatactaggtcactcactctccattacatcatgtgtggtgccaggaagagctgtaatgataaagttggacttggtttctggtgacagagtgacttcggggtcgtggtgaactgcctacgagtgttagtgaggaacgatgacgggacaggaggatgagaactctgcctgtcacttccactgatcaataagcaactattcacagtcaacatggcaacttccctggaaaccaaagcaccttctagaggtcctgctttgttgttcggttccaggggccgtggttagaaggacggaagtcagatctgtggagcactcaatcctgggccgatatcctgggtttgctacatgatggtaacaaggtagaaattatgagtcactatttatagccagcctgtgaatcctattagcacgtctccaattttctctttttgtcaagggaacagaaatccattattaagtacttctacaaaatgacctcgcatttccttcctaggcttagcgttcagctgttggaaagaagtgaagagccggcatagtttatgttaagtcacaggaaacaaacagctctgaactgaaaagacattgccaggcagagccattggcctgcagatacccatcttcatccggcaaatgaagtttctggaaaagagacatctttagggtctctgtaggtttccagccgtaaagctgttgaatagtcaaggttgcctggggaatgaccataggtcttctcagttcccagagaaattacctttgagatcataacaggccttagctgcctccacctgactgctgtccccaaacagcagcctctgctatctaccttgtgtgtctctacttgcctaactgagatggtaaatgaggtagacttagctttcttccagaatgaagtcaagccctgaagcatgactgctttcttggttgatttgtttatttattttggcagggactgaaactatataaataagcaactattcacagtcaacatggcctgaaactcactatgtagaccaggctaatctcaagagatccacctgcctctgcctccagagctctgtgattaaagctgcacacaggatgtgtggcagccccttacctctcttccctaccagatctgtctgtcactcactgcagcctcgtttgtgtccgatcatccaggaagaccatacccaccagagctcatgcagcttagtcccttgacttaaatgctgggccagtgcccttgccctgttgcctgtcccttccccttctccctgcatcaggactctgactgtgactgactttaccccttcaccttgcctgctgctttacactgtggggagggtgtggggggaggctgtcttcctcagggagagctccctgcctgaatgtaaataacacacacacatagaaaaaatcatttttgaagactagtgtgaacacactcagtattataaaggtttctttgtattattgattcctattttctcatatgcccaatcaaggtctagcagtctagcagtagacaatataatttcaagggcctcgatcccnnnnnnnnnnnnnnnnnnnnnnnnnnnnnnnnnnnnnnnnnnnnnnnnnnnnnnnnnnnnnnnnnnnnnnnnnnnnnnnnnnnnnnnnnnnnnnnnnnnnnnnnnnnnnnnnnnnnnnnnnnnnnnnnnnnnnnnnnnnnnnnnnnnnnnnnnnnnnnnnnnnnnnnnnnnnnnnnnnnnnnnnnnnnnnnnnnnnnnnnnnnnnnnnnnnnnnnnnnnnnnnnnnnnnnnnnnnnnnnnnnnnnnnnnnnnnnnnnnnnnnnnnnnnnnnnnnnnnnnnnnnnnnnnnnnnnnnnnnnnnnnnnnnnnnnnnntagcagcctcttctctcctctcagaatctcctgacagccatgctccattgctaatgctgtgcctcgtcttcatgaggctgtcggcccttcccttccctctacatgtctgtactgtaaaccattttttttttatgagagccacctttattacttatgtcttggtagtgatcaccctggcccagctctgggtcttgcctttctcttcttatctggtcagacaggacatgccttatcattttgggaaattatcatctggaaattgaacggtgaagccttcatctctcctaaactcagctccctctcaggtcacatgcggaaaggatgtgatttttgcttttcagaccacctgcctggtagttaattacacctcaggggcctggttcacattcgtggcatccggcggtgtggtggtgtggtggtgtggtggtgtggtgcattcctgggctgagagtagaatcattcccagtgacgtggggaagatgcaaaggatgctgggaaaatgccttcccaaggcagcctgtcctgtttcatcttacctgtgtcccaccttcccaggactagatgacaccatgattttctttggtcctttgctcagcagatgtcctgaatcacactgggagcctctgtgttgttggcactgaggagagagaggcaggctggatgtctatctgagtgtcacttctaggtgtgactgtcctctaccctatcccatgtcctggatgaactggactcttgtcctgcctgctttatgggcagccctgggctcatagggaagcagtggaatggaggaagagatcctctgtgacctcatctgtgggacacatagctgagactcctagtgcctggcctttggaaaatgggaacctggagaggaggaggtaaggggggatggctgtctccctctatctttgcctctctgtccaggagaggtgcctgtaggcttccactgcatcttttctctctgtgtaagagagcaaggtgaagcatcccactccatctgtctacatgggccatatgcagtagcctgcttccctccagcagtctttgaatgctgtctgtctgtccttgggttttcactaaaaacatcccggatatctttccccttagtctagtccctagttaccaatcatttgggaataccatgcagggatctgtacttaaaaagaaaaaccctcttgctctgatctaaaggaagggggaaggaagaccaggttgcttttctaatctgaaaattaaaattctgaaaacgttcccaaatctgaaactttttgaacactgatctgtcccacaaatggaaaatcacacaccatgaaatttgtttgatgtataaaagtatcaaaatattgaataaacttgtcttcagacatgtacatcaggtgtatatgaaaattgaatttcatagatatggctctgtccccaagaaaacttacagatatgcaaatattctaaaaatataatcagaatttcaaaatacttttggtctcaagtgttttggaggaaggacactcagcctgtctgtgtgcccgctgagctgagagcagtaagtttatgagcttgggatactcaaggccaggtcattagacggggacaaggaccctgtagcctgccaggcccaacaggcagcatatccaatgctccctgggggcctgggggcatcttcctggtacccagagatagagccatgtcatagattcatactacaacaagaaagttagccagcagcaatacccccaccctaccaaaagctcaaaatggataaattccattttaatattaatagaagttatctaaaatatggagacaaaacataaggggtcgcccttcaatcatggggagtatgcttagcgagcctgttcatgattattttgtttagggcttgttttgttcatttttagcgctctctgtctattttattttgggcagttctgagaattgatagggaagtccttttaccctattgctgatctatgcctccagcactggttttagcttattgacaatagcaactttgaaatattttctcatagcgagtacttgcttatgggaagtagttgtgctcagtggtttttggtgttgtacaagcatcacctgcagaggaagtgcatcagctgtggctccatctcctcatttagcagaccctagagtctctccatcctcccattgaggagaccctggagtctctccatcctctcattcacagacctcttttagagtgcagctcttgatggacttcaattcttgcttgaatctgttttaccaacttagccatgttcttcctttaggaattgaatactttcaaatctttcgttgggaatttgtttgaaaactatatagtaacaatatcatctttcaaaataaagcaaattactgatagtattttgcttgtatgacaatgtatcattttaaaactgactcctgtctactttgtactctctctctctctctctccaccctagatgtttacctacatcctagctcttctgatgggtatacactaattcaaaatttcaaactcagtttctgagttttcataaatacctgcatgcactgatctttacacaaatctgtgtttcctttgagttcattgctctgtgtgcaatgaggtacatggtctcccagcagggttccgctgacaacgtttagatggaactcaggttttccttcctttgctctgggttgttgttcatgttgaggtcaaccatcctgaagttcctgagttatgttttctaatttctctgtagaatctgtggccaagtggagatctaccttagataaatatctggcaaacttacaccccaaagcaagtctagttctgtctacaacactccactctgatggtttgcaaagcactatgggatcttgtagtgcctggcgttgctgtgagcatcatgtaaagtatgatattttcaccaaataattcatgaatgctagggaaaaaacaacaacaacaacaaaccaacagagcaaacagaaaagagtaaacaccagcctagagataccccataaaaagtgttttgggtgctgaagagatttgcccaagtgcagaaacaactgggacatattttaacatcaggaaatagttgcaagtgtttttaaagcatcatgtgacagtatattaaacagcatttttagtggtagaaagatggctcagcagttaagaagactggctgttcttccaaaggactcaggttcaattccccgcacacacatggctgctcacaaccatctgtgactcccagtacaggggatccagtgcccctttcctttactctactgtatatggcccacagacgtacacgcaggcaaaacacccagacacagtcaaaaaaggaggaaaggaaagagtaaaagtaaaaagaacaaccccaagcccagacatgttgagtttagaatcctgagtactgccatgcactccacagactgtgcttgctctaacatttgcaggccttgtgcttcctggcctgtgggttctgagggccgccatgtatttgatgtatttgtctggtaaaattgataatgttttttcttttcatttgctaatttacctttgcttttccgccaccctggttgccttaacgtccttatttgtgtgaaagaaaacgtccccttccaagttattcaacacagtcacctgtggctttggagtcccttggatatcttcagatttccttgctggaggcttctggccccctcctttgtaattatgcgctgttcctctgtccctgatgttttcttagtttccaacattcttgataaaagagaggtaattagcgtattatggcgtctcttttgaattgttcgcagagataagcagaggggaatatgctacatgggtaaaaatttgcataacaacaggagcagcctttgtcacagaagctcagtgtaatctctgggaaaatgaaagcacttatttatggaaagttcctgcatgtacttatctcaaagaattaaaaattaccactggctggcggtggcctctaatttcagaagtaatgtgtcgcccccccaccccacccccattgctctcagtatgccctggttttcaagctacaccctgacatccttctgtcaactctgagagggttcccttccctaaagctgaaccagaaagttaaatatggaacactatagaatattctctccctaactagctcacaggagctctgtacttgcctagcaaatgattgaatgaatcagtgaataaataaatgaatgaatgaatggatagtggatacatttcataaaaatagtgtttcctaaaatgcctgggatagccttgtcatttccttctatgatccagaatcaaaagtaacattttctctgaatgggagtcacgttccttcccgtcagccctggcgtttgcctttgactacctgtctccacaatttgcatgaggcagcttaagtctctcttcatcgttttgcataaatgatgctgcagccaaactctgccagctgggcttgccagctgggaggacagaagtctctgggtctttagtctgctcagccctaacatctttttgccctgactcagggatgagggaccctagctctatgctagcttccccctcaggcccatctcgctctttgtggattattcttctcacgacccaagcagggcacctggggaattctcatttccacccacaccttctagagaacacactcaaggtttccagcctccattctacgtagggcaagaagctttatgccagacttccaggccgtccactgagtgacagacagacacaggtacaagcttatggaattacaagtatcagaaagaagttacaaatagagggtttggcctcaccctgaccttgagcttgttgccgagtggactgcttactgcatagcgtgaatggagaatgttgaccagctctgagactgctatcccatcacaactgacttaaagggctagcaagatggctcagtgggtaagagtattgtcctacaagcctgacagcctgaggtcaatccctgcagcccggggggaaggagtaaactacaatgttgacctctgacctccacatccatgcactggcatggcaacacacatggataaaataatttcaaaagaatgcagtctattttgacttaaacataaaactgtagcctgggatcaagtgaggagagaggtggaggaagccacagccataaccttccctgctcaccctccctgaagcccccaaaggcctccacagttgagactcttcaactctcagattagctgcaggtgggcgcttaatgtcttgtaaattagcatcatccttttccaaaggagaagctgcaggtccaccctcctgagtcttgggtgccttgtacattgcaagtgtgttttctgggttgtagacttgtgtggggagccacattcttctgtcctgctgaggacataagtgttttcccaaatgtggtcactgtgtggttgtggctgcagattccagctggtgtgctgtgtagaagaaagctaacgattttaatgtggacttctgattacacgttggtgctaagccctttagaaattccagctttattaaacccattcataatcatgagcaagggagtctcaggaaatgtcccagatatttctcaagttcacaatttccatctcccatcagtagttcaggtttgaagcacctatttgcttgccatcagctacagtcttaggatcgtttccccgtggatatattaacacaaccctaattcatttgtctagcaatcacccattgtagctttggactcaatgcgctcaatggtgatttaggtaaatttgttagacgcagatgtgccatctcagggagctgttaggggggaggagtgtcttgagtccccatcccctcgttcttatttaaatcatttcatttcttcttcttgagccctttactttctagaaactttcctggtatgcgataaattttctagggctgccataacaaactacggtgtactaaatagcttagagaacagaagttaccctttggttctaaaggctggctgttggtaaggttggcctcttcaaagaactgtgacagggaatctattctgtgactcacccctagcttctggtggctggtgacaacttctggcatactttggcttgtagatacatcacccaaggcagtctccatcctcctgagaacttctctgtttctccttacatatcccatctttttgtaaggacaccagtcacacttggctaggaacttgacctacatcaatatggactcacctaattaattatatctgccacaacttagctccacataggatctcagtgacttttgagttgtagagaaataaaaattggccatgtttgcaagatcccaaatttatgttttcagctcttaattatttatattttcagatagccacaaaagtagaggcggatgttgtaaagactctgtacccgtcttgcagcttcaggaatcatcagcttttacaagccacatgtcatccttcctgcgccttgtgtttccccctctgctgagagggttagaaaaaaatcacagataccatattattttacgggtataattttaaaagacagagaagaagatcagactacactgtctcaccacagtggcagtgaagggagagaaaggttaaatcgcttctgttagtcttaaacatgtatctggcttttaacactgcagctcattaaagaagtcggggagattgaaagggaacagggagtctcctctctctctctctctctctctctctctctctctctctctctctctctctcacatacacatacacactcaggcacacacacacacaaatacacacatgcacacatgcacacatgcaaaatgctagagactgaaccaatgatcttctgaatgccataaaattttctagcaccagcccttttagtttttgtttgtttacttcgagacaggttcttgctaggtttctttgcttggcccttacctggttcaggccttaatcctgtgagtctcttgagcagctgggaccacagatctgcaccacccaaccttcagccaggtcttttccctggctttctccttcctcttttcccagctcctagttcaccccaccctttctaccaccaaccacatgtgagtgttcctggcaccccttcggctccttaggattcttctttactgtgtaaatgccttgttagaaaatttgctctgcatgcctcgaggcctctgacttcagtgctggaaccaccagcctgactgtctgtctgtctgggtggtcatgaagcataaacccacccagcctgtctagggcagagcccaggcctaagccacatcgaggattttccttcctctacctgtataatactcagctaggtctcaaactccaagtctgctctcagcatctgtttgatctcctgcatccacacagcctcccagagatcaattcctttaccgggaagaattctgagcgtggaggatctaattcaaagtggcagcagccatagtaacatgcacagtgtggccttgttctccaagatcctaaaccatatggtttaatagaatgaatgaggcagatgacattctgctaatgtcagggctgaatgcccaacctgaccagaaggctgagcaaaattgaaggccacagactctgaacgtctgacttctcaaatctcctcagccctttcttgccccagccttgtcccaaggttcccccttggctgcgagatggtcacaccattgccacattactgctggagtcagtaactttggagaagctgtttgcaggatcctgtctttcatgtcttacatcatcctttagatccttcagaatacactgcaggtccacgcaagggggggggggggcaggaattccaaagagaggatgctcaggagtgctcactgacattctggaagaggaagaggtggctgcacggtcagatatggaaatatgggtagttttggagccatctgggcatgtgtgcatggctgcttagggcagagctgatgtgccagcggatgagtggtattctttactccatgtggcacggagcacctactggacttgtttccatacaacgtgaacgtgtatcctacgagaagattgtcttcaccgttacaaatctgaaaccaataattttcttttaaaatgcaaatataagttcaatttcccctttctttccctatgcagctgaaagcacgccgcgtcttagagactttcatttcattgaattttgagatgacattacctttcattaatcctttctagcaaagtttaattaaaaccatcacatgatggcaaccattaatggtttttttttttttagagctcaggcaggcttggtagagcagacctgtggtctcagctatctgaaggctgaaaattcaaggccaactcaagctgtatgttgagttcaagactagcctactcaactctgtgagacccaatctcaaattaaaaaaaaaaaaaaaagatgaggaagaaggatagaaagaagtaaaacgagttctggtgggcaatgcagagatggttcagtgcttaagaacattggctgttcttcctgggtccaattcccagcacccacatgaaggcatatacatacatacatacatacatacatacatataatttaaaacattgtaaaagagggctgagggcagagctgagctccggagtgcatgcttagcacacacgaggccctgtaccacagtgaggtcagagaagcagggaggtttggctacaagcttttgtcctgactggagcaggactgttagagttagcaggttctttttagcaggttccttttgtaatccagtgtatgttacaccatgttcctcccccatgttaattttagataataaaaagattgttaaacctacattccattttacatgaatgaatagtctgagtttgaaatgatttggacttgagactgaaaagaaaggaaattatttcttgaagaaatacaaagccatccatgacattatgtctctgcccccatgacggtctgtatgaagtgtgagcgatacatatcccatcatgcatgtagatctagtgataaaggttgttaattgtttgatgaaagaacccgagccacaattagaaggaggtactatttctgtcattgtcactgagcttcaccatcacgggttcactggaaacattggggaaaacatgtgctgtccctcacagtctggactgtccccactcagttctgggctgtccccatgataccactcagttctggtgttggtttcattggaaattttaaagaataaaagagattttttttcttgattctaagaattatgaatatatatcacaaagatccatgtaaatggggctccaaggctgaatctcttactgtctatggcttcctatggcacttatttcataataattattatttgtaattttgtaaatgttgttctgggtcaaatactcttctattatataagacatgttatatcaagtttttttttccatttaaactacctttaaatgtgtgcttctgtggcactaaatctatctacagtgttctggaaccatcagcactgtccatgtccaggtcgtaaaaaataaaaacatttttaaacaggagctctggatttactacacatcaattcccaacttgttccatctctaatccatggtaaccgtgtgtgtgtgtgtgtgtgtgtgtgtgtgtgtgtgttttgtatatgtatgagtgtatgtacaatctatttgtatgagtgcatctgtataatttttatgtatgtgtactttgtcctgtgtgtgaattttgtgtgtatgtgtgtgcacacatgtgtgtacatgtatgtgtatgtgtgtgtgtgtgtgtatttgcaggtacacacatccaggagagttggcatcaggtgtctgtactactactacttattatgtatttattaactatttaatatatactaaattattaatattattgagaaggactttcaccaaacctggggcttcccattttggtgagtctggctgggtagggagcccagagatccacctgtctctaaccctctcagcactaggtatgtatcaacctgccgggttaataaccctggttctcactttgcccctgaactatcttccctgccctgataacctcttttcccagggccgtgtgtgtgtgtgtgtgtgtgtgtgtgtgtgtgtgtgtgtggtaggcagtgttttccttctgtctctgacgagtggactcacactctcacattctgttgcacgtgtctgaactacattcctctctagcactgcacagctcaggctgccgccactccatctcagtcacacatctactgataggcatctgggtcatttccacagtttatcagggaataatggacgctggtgacttctggctttcagttcttttgaggttatatctaggaatgcaatatctgggtcatatggtaattctagatttaattttgggacatctccaaaccttgtcctgagcacttacactactttgcatttccatccttagtgatcatgagtcctatttctttgcactctcgtcagcacctgtcagttttcctcttcttcctctccccttttcttgtcctattctaaaccttcaggccctccctccttccctctctccttccctccctccttccctccctcttcccctccctcctcccctctctcctctccctcctcccctccctcctcttctccctcctttccttcctcctctccctcctcttctccctcctcccctccctccnnnnnnnnnnnnnnnnnnnnctccctccctccctccctccctgtttctttattccttcctaatgactatgaagtagtggtaacaattgtttttgtttgagtgattcccttaggcacaggagtactgctgcagacagtgggctgtgtgtggcagtgtttgcgaggctcctcaggagcatgcagggttgactaggcagggctctgcagcatcccattcctgtatcagtaccgttgactcaccatattctttctaaggtaaatctctctgcactagtggagcatggggcaaacctctgacttgccttttgctcagagtctagggaacactatccccagccaggaggtcaggagatgtctgtctgcaagaagatggctttgacacagagagttcacatgtcctggtgtgtgtctaatggaccgaaactcctctagtcaagttaatgtttaccgggttcataggcgggacggtgtcagagggaatgtttctcttactctgtttggctttccatatgctctttgttggttttttgatctccttaaactaaacacacatgactgagaaccacttttaatgtcagcatgacactcttgcaacacacttcagtttttttatttgaatatttaaaaggagtctctgacccaaaattaggccactgttatttgttctgtgtctgtaatgtgtttttggcagatgggggctatcctcctcagtttccgtttactcacactgtgtggtgttagccatagacagggatccccatagagagcattcgccatcgcaaaggcaggtcatgtggaggagactcacttcctcagtcctgtggactggattcctttttatgctaatgcatcaattgcagtgtggtgggctcgtcaggggccacctgtccctgttgggaacagggagggttacagggaacttgctttgcgctcagaaatgggagaatgaagatttactctgaatcactgtccctaggctgcaggctgactcctggagagcaggaagatggctccttagggaaagtgcttgcctgacaagcaggaggctctgagcttgggtcccaaggcaggtgtggtggtgtgctcctgccatctcagtgctgggaaggcgaagacagctggacccctggagctcacagaacagctagtcttgccacattggtgtgcttctgggtaagcaaaagaccttgtctgaaaatttcgcaagacagagagtgaaagagggtgacagtgaactttgacctccgctgtgtacatatgtgcaacccccaacacatgtctgtcccctctgatacacacacacacacacacatacacacacacagagagagagagagagagagagagagagagagagagagagagagactagacagacagacagacagacagacagagagccagagacagagggataaacacacactctagagagagacagagagagatggagagacagagagatagataaacatatactctagagagagagacagagagacagatacacacagactagagagaaagagaaagagagagatagagagatagatacatacacactctagggagagagacagagagaaagacagagagacagatacacacagagagacagaaacagagacagagagatagatacacacacacacacactcgcccatgtatgcagtctggcaggatgactagtgcttctttaaagcaaatctctgcagcaggagactggccatgattgtaccttcactttcttcagtctgagtgtggcaatctcaaagatacctgcctgccaaagtcagatagctgataaaactgtgccatgtgtcaggtaccccagcactcaccttctcccagttctttttaccccacgttacattggtcatttgaattcttttagattttaaaataagatagtagcttttgaaccagaggaaaatctccactggccatgtccaggtaagcgcagtgcatttattaggcctgctccttcttttcttctctctgcaacagtcctatggcatctctgatgcttagattatgtggtcctgcaaaaacccatatcgcctatttagtctgcagcttggaagcaaaggcccagggcagccatctgtgaggtttggaaggtctggccactgcgcacattttctagggcagcttttcccagacaagtgttgcatccagccagtcagccccaacgctcttcttcttgcgccctgtctagaggtgatggtaaggtcaagaggaggggacagccgagcttcgctccttactaaggcatgggcatactgttttggggaacacacattgctcgttctcttttgagaaagagcctcctgtcgccccttgttggcctccaattcactacgtagtccaggatgatagtggactgctgacctcactgcctctacaccccctcccttgtgttctgggatcataagtgagcgccaccataccctgtatgcacagcgatgggctgaacttagggtattgtgcatgctaagttaaacatgctaccaatggaatgttcaaagcgcaagcaggcttaaggggctttatgccccagataattcatgcatccatgagaatgctagaaacataggaccttctgtctgcctcctcttggaggcattcattcaaatggaaagtgtacgtgtgagaaatcttaggacaagagaggctaaggcagggtggaggaggaagtcatttgggagtaggtaaagatctcgctgcctctgacaattttagagggcagtaagagcttgtttcttaggaaaatatttgaattaataatctttttaaagtgcgtaacagaaatacttcagctagtgacagtgcactgctatgtagagatgacagacagcaaaggcacactgttcctccaaagggactagatacttacgtgtaaatagtgttcatctgggcatggagatggttagcaaagaaaggggaagattcaagcgttggaacaaattaagtaagaaatcaaaatgcttgtttaccccccaaagttcaccttcatcagaaatcacaatgaggccacaatgccctgcaacactttcctttagtgattcttctgctaatttcaataaataaataaaacatacctttgtgccaggtgtggaggggtgagcagactcatgtgggtctccccactgctgttttattaactattgttggagaatttccaatcaaggtgcctttagcagaagcacgtggaggggacttgcatgcactcaagacccggaggagctcagcactgccctctgattgcaccggcactgcctgcacacttagccccacactcagctcctccagctctctccagagaagcccacacccatgtcggctcgttctctttatcgacctctgaggccagatccgtgtaaaaatctcagcaaacaccaacttggccctcgttcgtcctactatgctcttctgtggaaagtcacgaatcctgacttacgtgagctgcaatctcataaacaactctccaggcggctactggtagcagcaaggacctgagtctcctcctcttgtcccactgctcttgatgccaacagtggacataacactctaagagtaatctaggctgtggcattaagcacatgaaacctggctgtgctgtgtagtaggtgggtgaccttaggcaaggccctccactgtccatcagtctttccatctgtccccctgagggtttccctgactccctctctctcccattcatgaagattcattgtgtgcttaaagctgactatacatccacacaatgttttcccatctagaacagaggattttgaggcatatttcatagtgtggatataaagcttccctatgataatgcacatgaagggatggtacaaatgcccgttcatagcaggctgccttttaaatgctatcctgtggtcactcagcaggtccactcacacttctgcaattcttcatcttagcagcctaagtaatgagaggtggttgcttctatccctagactacctagaagactcctagccatgctttagtcgatatcctcaacatatcacgttagatttttttctaacaccaatgcttgtgcctctgacatatcactttcatacacattcctctttattcgagctcttttgatggcttccaagggacaggaaaagattccgaatttcttcccagccactcctgactctctaaggatccttagcacttggctcagtctgtgaattctctggggatttcggcaaaccttcggtcttctgtcactggctgaagtgactcctcctcctcctcctcatctccttcagcgactaatacaaaggcgggaggttgtgagatcctctctgtaggagaagaaaagagtgcatgagtgaagaatcagagtgctctaaccttctttgcactgtgtcttagttcccttctgctgctgtaacaaaatccccgccctcctccactggatataaataacccactgctccggatgatgaaaacccaaggtcatggtgctggactggcaaggtcatggtgctggactggcaagcaccttttggccgtttgctccagagcggaggaaagcagtgatccacgtgaaggaaggtcttgaagagtctaagagacaaaagggcaggaccacacccttcttactttatatacttattcgttgtgtgtatgtgtgtgcatatgtgtgtggtcatgcatgcacacttcagggtgcgaatttggaagtaagaggacatcttgctggggtcagttggattcttccaccatatgaatctctgagacctaaacggagacagtcaggttttgaggcaagcacttttaccttgtgagccatctcccctgccttgaacttgcccttttataatggtataagtcttacttacaggggacaaatttttattgctcagtcactggggtcccttctccacatctcatcactagagtggcagccatattttatcagtgtgtgttttggtagaaacatacatgcaaactgtgaaatgtagtgagaactcgtgacttccagaatacttaaggtaggcagcatctcacttctctaacatagtctcctcattagtcaacacagagcagcagtagagggtgctctgtgagctccgctctaagctcggaagaaaggattaagatcacttttgtatcctccgtattacatcatccgcaaagactgcttggggattaaatattcatttctaataattaaattattctattgatccatcttcagggttagttatcaaattggcactgggcttagaaaagtctcttaataattttgttagatttgcaaaggttcttggggacagcctctgtcaaagacagtgtaaagaagtgttagattgcatccaactgattttcaaaggggtatttgcaatagattgaggtttttttttttttaagtatttttattttatgtgtatcagtgctttgcctgcacataatgtctatgtaccacacatgtgtaagtgcccacggaggctaaaagtatgtgtcaggtcctctggaattagagtcatagatgttttgtgagctgtgtgctatagatggaacctgggtcttctaactcacactcaggatagttctggattatttatcatcagctattccttttctagttattttttttaacatgcagtacgtgtacaatgtttgtatgcatatgcacatgtatacatatatgtgcttatgtgtgtataaatgtgcagaagtataagaaagtgaaaacatgttgaatctgtaaccctgggttatatacattgaggaagtatctcataggctttggatcttctctctccccagctttagagttgagaagttttcctgagcattttatggaattatctgcaagcttaatcgaattaaaatgttgctgatttttgagtgaaatgccttagtgttgcagtgagattctgtctgtctcgaaaccaaaatgacttctcaccatatggtatattaaatataaacccttctgattttcattttcttttctctcctcagtttgctgttttgtggttcataagaggtgccatgagttcgttacgttctcttgtccgggtgcggataagggacctgacactgacgtaagtaatctgaaaactctcacttgatgttaactcgaatgtctgaggttatttattttttttattgcctatacagccgttgttctggaacatgctattaataaagagacatctcggttttctcacttcgtcttgtaataatgaatatgtccatcattcttctcagctgtgcgctatttcacagacatatcctcagaggaaaatcattagcttgtatccatcccgcccctcccaccccccaacctatagtaacaactctatggatacagttcacaatgggcgaggaccagccttggtttatctttgaaagtttgtaattacaacaatagtcagcaatctgtcttgagcgttgtaacaaactgcccctagctgcaaggagagaacacattttcactgagcgccataaatgcctgtattgaagggatgctgtgggcagctctttcgctgaccgcaatctctgagatggccagtaattttatttcacttatttatgtcctcattctccctgtttgtattgaccgtgtcagattcatctcttcttaccaaaatacaagaccggcagaggacagagggcacggtgaaaagtgaagcactggtgtttgagctgtgttgggtggaaagacatttggtgccatgtgaataaaaacgttttaactgaaatgggggggggggcatttctaggctgaattcctcacgctagatcagtttgattatttatccttacgtttggccttcccacaattcccacctatgacacctactcctacaagaaaactggttcaaagaggcttctcagagaaactggacatttctcagaaggtgacattttcacagtgggctatgaagaattcagatgtgccttgttacaacctgtgtagtaaagaaatatacctttgatggtttgattaaggggttggtagagacagccttgatggatgcttggggcttagagtgactggcaagcggacacctcatgtctctgtgttttatcactttgtgtatgaggcagctccagtccctgaaaagttgactgccttgcttatgtgcggccaaaactagtgtccttccctctcttaactcagttctccatatttttcttctttctaaactatatctccttataggacattttagagataaaacaagaccaaaaggtttcatgttgatatcttggataaattgatcatattctactcccaattccctctcataccctcctacctcaccaatcacttttctcttcccagtctaccttctacttctgtgtcttggtttggttttgtttgtttggtgacccaatgaattcaacccaggttacttacacaaacataggtgaggggttattacagaagtgtaaacaactgttaggtggctgtgccatcaaagaaaatgtctcccctcccctggcagccattaactgccagtggctcctcagagcccctcttccatctgtgatggactgtcgatgggtcatatcttgtttagtctatggaggtaatcacagctcatgtgagttcacgagtacagtgggcatcacttgccacaggaccacagtccataacattcctcctcgtgttctccctgcttctccagtgttccctggtagacgtgatgcacatgcccactcaggaccaggcgtgactaaccagctacaaatctctgcaataactaactcccactgcttctctaactgaaagctttctgaccaaagattggagcagcaccaatctgtggacataaacatgaatacaacttgatacatctgtttagcagaataacaatatttgtttcctcgataggctctatgaccactacaaccatagactttctgtcagatttacaataccctcggaggcaagaaatgccctcaaatccagtcagaaaaatcataaagtgcttggttacctctatggaagctacgtcactgttgtaccagggggtatatagcctggcaagacaggagtgtcccacacaaggttcacagttggctatgggctttgatggcatttctctctcaacgtcctgcgtagcacctttcagcatcatacaaggtagcagccagaaggaggaacacttctggctcagttccagtcaacgctgtggcatcttctatgacaggtcttaccatctaattctggtgagcgaccaagagcagtggcaggaacttgccttgtttggggcttggggggcccagaggcctccctgacaaagcaatcgtaagaagggtgtcctactgaataatctgtcttctgggggtggttttacctctgttcacagtctgatccttacctcttgtgctttaattaacttgcaaaacagtcagattcccttgtcgctttttcacgcatccttattttggggtgatcttcctccatccatattccatccctccgacccaaggcttcctatccccaagattggcctcttcattctcccaacaagctgttcttctgctgcccaactccacacctctgttctccttcctcccatggctcccttctagcttcctggcctcaatacacatccactcccacatagacacacatagataagaattggaaatgaggacccacataggagagagaacatgtggtgtttgtctttctgggcctgggctttcttaccaactttcctaaaaagctgacatcctgttgtccatgttttgaagtcctctcagagcagcacgtttcagtcccttcccttccatgctcagactcccatcttcttcctgttcggtcctcccttgtctctttactctcctctctatccctgccgcatccagaacaagaagctacgggtaggttacaggagcacagatagtccttctcttccttttcctgcattttcagttaagtatcaattattaaaaatctataatgaaccaaaatgtgtcttgcatcttgaggtgcgacaattaacacatatctaactgtctgctcagccattgttgtgcgttgttctgggggaaagtgagcctcttagcctgtttggtttggtcctggaaaccagacctgggaaacttggaaatgaagaggccaacagacacacatacagaaaagctggtgctgggtgggccgggctcaccctgttggagaccacctactacatagcccaaaaactcagtgcataggcaatgccaggaagagaggtataaactggtctctgtgggagatctctgtaagggagcagcctcaggttgcagtcatcctggaggaggaagctgtggctgctacatttggcatgcatgctgttcaatcttttatacacactcatatgtggatcagagaaaggctttgccacgcttctgggcctcacccagggaaggtgttgccctttccatgggcctgaggcagtaaggtccttaacatggccatgttcacaccaacaatgcacatgctcactcaagatctcatccacgcccctcagaaatggacagttaaaagtcactgattaaaatgggacatctgcacactgaatagtatccttaaataacctattctaagtggccatggaagaattcctcgatgaagctgaatttaaactgagtttcaacagtgggcagaaaacaggcgtgtgtgtgtgtgtgtgtgtgtgtgtgtgtgtgtgtgtgtgtatgctgggatttaaggggctgttgaaggaactgtttcaaataaagggaaagcaggtagggaagccaagatgtagctaggagctgaatctgtgagggctggagaaagctgagcatcaggtgtctcgctagggatttggaatacaatctcagaagtgatggagacccagggaaagttttaagtgagaagtgatgtaacaccacagagcatctgctgaaggttactctggtctccttttaggagacgcattgggttggaagtgggtcactgtactgctggaaaatgggaagacatatcaacagctggggaggcacctgctctctagagaactaagacagtgctttggtggagttagaatcagtggatttaggaggagggaacacattcaaggattatttgagaaccacgtaagtaacctttggtctttatgaggtcatggagatggagatactcagaatacatggatggatggaggcactataggactgaacgtgtatttgagggagcacagtggtttcagtttgggtcctttgagcttcagaagtctgaccctgagaagacagttgtgtgggaaccaagtgtgaatggaggtcagaagggggtgtgtccagaagacacagatttcataattttgttaagactgaggaatcgatcctgtggcctagaaagaggatgtagagagggattaaaggcgtttagattctaggacagagctctaaggaactctatcccattgatgagagaggaagaccggggagggagaccaagaaggaacagctagagatgtaggaggaagaaggacgggggacgggggggggggggggcttttgtatgnnnnnnnnnnnnnnnnnnnntagtcacttcctgcagggtctgcatgccaattgatcctgtttgcattggttatgcagactctaacgatctgtatttaacacaaataatcaatgcacagtgtcccacagtttgcatgagaacgtctcggcttagatcacaggtccattggtgcacactagttttcaacagtctctccatactcagaatgctttcctgtttggatgctcatcctatggtcaaccctgctcctggatcccagaaccaggcagaaaagcctctgtgaggagctgcttggcatgggatgaaatgggaacacatgtggcctggtgtccagctaagttctgctcctatgccatttgcagtgagtgtaccaatttcccgcaggcatggggcttcccgtccttaaaggtgatgctaaggggatgacttgtttcaatataaggaagaaaaaacggttcgtgagacgtacgaagatataaggactcagctagccctgcgtgtctaactcacagaggatcatgtatactgtttcaagaacatctgtccctcctgtttggagctcagagacccatgactttgggctttcttcagccagggcacatgacatgtcatccctctatatccttggtggtcattgtacaaatctgaagaagtcttagaaaaccacaagatggtcgcactaagccacacaggcaaggtgttagaaacgcattctggatagagaactgccctgtatagttggctggtttggctagactggcttgcagtgacctccagggatccgcatgtctctgccctctagcttaatgacaatactggaattttggttttctttaaaaaaaaaaaatacacacagagagaaatattataataatattgtttcattttaaacccagatatggaatatggagctgcttcagattgtccacagcatctgaccatgatttgcctcatgcactagcagggatgtgattttgccagctgcagatacttcctgtgattgtgtgatgtttggaattctgtcaagttttcagaggatatataaatgctagggtcccaaaagcagggtggggctggctggtggttggttgctattggttgttggtggtcatggtttgttaggtagtcaggtgcaaaagaagaaacaacaagaagaaattaaatatcctgatgttgaagatcaaacttgccccaaggaactcaatgcccctaattagcgggaagtggtctaacaataatgtcaccctttttccccctatgcttttttctctcctgtctagtgtagggggttgaaagggtggaagaaaaggtgtggagaagagtggaagtaagaagaacccacaaaatagctaaagtccagctacacatagcctacctcagcacagggattacagttgcatgccactgcgccccttacacgggtgctggggatccaaacacaggtccacaggcttgtgcagccaacactttaaccattaagccatctccccatctcatgtgcttttctgaatacatttcgaagacacagaactacagagctggaagggtgttagagatcagtctaggttaatcttgttttgtagtaaggatactgaggcatactagagaaagtaaaaaacgtcctgggtaccattgtatgctgtttgttgtgcatctaatgggtttgtgattggctccttcaaagagtgagccctgaagggaaaggaagaggggccgatgggtgggtggcgtgtgctgtcagtggagaaggttggtagcatgtattggcaattctaatcaagtacttacaaaagtgccaaagggaaatgcccattgcaagaatgggtggagaggggaagatgaggtagaatttatgataaaaagctgctctgagcatttttcccttagaaaattttaaaatgttaaatggtgaattcaatgaaatagtgaattcttcactgcataaagaaaccactggtgtttatgtgctgcttgctaatgcctccaaagagctccactccaagggagtcagagaagtcagagagctcataaaatccacagatactggacctaccctgccccaccatcttcaagaataaggggtcagaaaagcactggagaagaagccagctgtgcccagatggcagcagcctgtggaagtgtgttctgagttcttctgaacagaggcgctccttgggctcaagaaaccaccatagttgaaagtctgcattcattttgggtatctgaagaaagacagggcttcatggttcaataaaaggacccctgaagattctcaggtcaatttctcagcctctcattctctctgaaggagggatgttccattacctcaaagcatagagggagaaaagaggcaagcatttctttgagtctaggagcaaccccgcaccatccaagtaaaggaaaaaaagaatgtagaaggtacctaacgacctcatgcttagttactggggctgtggattttcagagtaaggagcccccagctggaaagtaacaatattggggtgcatggctcagaaagtaggcaggactggaaggccactaagctctgggcatgcagcctgagattgcagctagggttctgcccaccatccccacatctaaagttttgtgagatagcagcctaacacattttttaaaaatggtccttgcataaaaataatttttcacctctccccactgactcagaggtggttggggacccagactggctgcagagggaataagacctcattttactttgtgtcagggacagtgaatgtgactttgctctgtggaggaaccactcgaattgttctgtcttcagctccatgaaccctattctctaacggggttcttttccttgttctggccacgaggaggtcaggtgggtaggaagggttacaatgggtccaatggccgactgatctaaagaccgatcctctcacttcttaagagtgtatccgcttccgtagctcaccagctctcaggccttctgtctgcagtcccttcctattcttagaatgtctctattaatcttcagttatgcctgtttgcaaagctcaccctgacagaggggaggtagggcattccagtctgtcagtatacatgcatacatatgtgaaaaatatgtatgtgtagacacacacacacacacacacacacacacacacatatatatatatacacatacacatatacacacacactggtgtatgtatgtgtgtatatgtatatatgtatgtatgtgtatatgtgtgtgtgtatgtgtgtgtgtgtatgtgtgtgtatgtatgtgtactcatatattatcactttcagtcatcttctgctctctgtctctataccttaagtgagagcaaagctgtagagcattttcacagagtcctcacggcattaatgatgccctcaacactgtcatgcacagccttctcttaactctgtagattcaggtggataaacaccatcctatatgccatttataaagaataggtgtgcgtctataatccctgacttgctcatgctgtacattggatgtaggtatatttgacaggatggtgcctattaagaggcctccccattatctgacgggctcatgtttgccttgtatttctgatacgcttagctgcgctgtttggatgggcctttgccagtggcatatactgtttggggagactgttcacagcatatcttatgcattttgtacctgaacagcaccactgaacaggattcaggtgaattcctggtcatgtctgtacctcaactgggagggagtcagccaaaatgcttacagacgcctggtatttgccagtatgtctggaagggcacccaaggaaggagttaggtaacttgtgaatatgacttgtccagaatgggcagatctccaagtctgagaatttataaaatttgtctcattcaaagatctgagagcaattgatacctgtcaacactgggaagcagccatggaagccagggtgcaaatgatagccgagcagaagcagaaccctacagcagctagccgctggccgtgggtaggagtccgagttgtcattgccttactgtgaccatgagttcagccctatgtcttagaaaccattgtaagaaaagaaaaaaaaaaaaaaaaagaccgctgatgttgcctaaaatttcacgtttcagagattcacctaagataaaacaaaagcatttaaaataaatctagagacaaattgaattagtggattttataattttctttcaagtgtgtttttacatttaatacagacccaaatagatggctttttttgagcaataccagttttactccaacacttttatttttaattcgtgggctgataaagacaagggagatacatataagatccaggcacaatggagttggggtgaaatctcccagagtgcactgcttcttgcccacgctgttgagacccttcctcaaccttgggtttttggggtttttgtttgtttgtttgtttggggggtgtttgttttttgtttgttttgttttgttttttgcttatagacagagggctccagcttgacaggtggtctttgaagtcgattctgtccctgaataccaccccattattacctaaagcatacggagctggagaacccctgacctcacaaagtggggctatctccactgcaaggatgagcgggacagtagggacagtggctccatacgccgtgagggataccagccatgcaggggaagaaatgcagggctattgagttaggggtgggaggtgatgtgcagtctctgggacaattcggggactccatggagatagcatcatgtgaagacaggctgtttgtttggtttgtttttcctaatgttgcttgcaaaatacatattttaatgttccttacactaggacacatctcctaccctcatgggaaaagagctgccaagccagaattcaggtgacatgtattgcaagagggcctaccatcagcacaggcagagaaacccatgctccgcaggtcccagtgggatgtccccgagtgagcttctcaggacgcccactctgcacccacccactgaggccctctccccactcaccgtgatgccatgggaagcctgagaaagaagttatttcagggaaacaaacccaacaccaaagccccggtgctaattctgctcttcagtgggtggattatcttctgtgccagcttcacagcaacagaagtttgtcctgcatggggaagcacctctgttgtctcagaaccttgttagtttagttgcaagtttaaaaaacagcctcaaaagatgccatcttcatcctaggcctgacgagctgcagggtgcagctgccaggtcttggggaatcatctatctccctaacccagcaagaagaggaaaaaagcaaaacaaaaacggtgtatctgtcccttggtctagagttgattaattcaaagatatgtgcattgtaactagaaatatatcacttaatttttaaccagttacctgaagccatctttcctagggagctgtcctgaggctctctcatttaacccagtgtttttaggtcgctgtcatctcaggaacttggagaaaaaggcaggaggactgtcttaagtttaaggtcaccctgttcaagcatagcaggtaccagcttagctaatagagggagacctttccaaataaataataaagtaagtagataaaatagtggaattggttagtgcttacgtttgtaagtaaattctttgtgggagagtctgtgtcttttctttccaaaaatagagtgttctgccctctctggcctggcattgagagaagtgattggtgatgtccccatgtccggattgacacgagttttacttgccaggccttgtttacctgaatgttctcagtgcaggtgagactcacactgaacctcagagctgggaaatgagtatttcattcattgtgacatgttaagccatgtgtgtgacatacctgacagtcttccctgcttgtcacagggagccatggaaaaccattttcttgattagtgcagtgtagttttaaaaaaaaaaaaaaaactaagaaaagaatagtgtaccttagcagcagtttttgcattgttttgattcaaaagctggtatgatagatgccttttagtttttcctgaacagggtgccagggagtttatgatatacaggcgctgaggctgcctctgggtttggaggtagcatctgaggaggcagccgctgaaggctcagagctcaatgacatactgcacacaaactggcttgtttatagtatcacttgacatgtaacatctttctctttttttttcttccttcctttctttttcttttttttttttggcatttgctcatgttacataatcataccatgtttctcgcgcatttataatgtggcaggtgctatgggatgcagatgtttaaaaaacatggcctttgtcttcaaacagcgtatccctagtgaagtcatgcatatgcatgaatcttattattatccccctctgtggatagcacccagctgcaagcggctgctgtcagtctgcctactgtaaggatatgaaaaccaaggctaggggtgatgaagtcttttctgaagttcagtggtggtgcgtggagctctaagctctgagctggattcgtccactttcagatccatcctcccttcctgtgccatagactgcgcagcaaaagcaaccggagaggcagtcttcagtcaatcattccctgcttgggggccgagtctggggtcagtgtgactatgagaagtcttatggcaagagatattggaaaggatattaacaggaaactcacccgttagagagaccagaaatatacccttatgaaaacgggcatgcagggccccagggctgggtaaggacctgcagtggcttgctctgattcttcagacagtagggaggaggggtttttgagggcaccgagtttctggaaagatgtttcgtgcggcttcacccttatctgaaagctagcccagagcttttggctcatgccaaaggcttattcctggattctactgagtcactttgaaaataaactgaactcacggtcccacccagttagctggtgccgtcctcaccttggcgatgctttcacggcttagtgcattttccgtaagtagagccaggaagactctgtgaacagaggcacacatatactgggatctaggaaagggaggggttggctgaggacctctgagcatctccacagtgccactagcttacttacagtagaatcaaaggccttaaacagtcaaatgaactcacttgcaagaggtgtgtttcagctttcagtagtggctcagagagattcagccagtgggaggcgtgccctctactgccatccatagtctgtggagccagaagctacgagttaactccgagtggagtctagactagaagagatggacagtgggacggtctattgttttatctggtactcattcagtgtatctatctttataagccaacctgctcttaaatgtttgtttaaagaacgacataacagcagaaaacagctaccagaacgtcatggtccctgtgaactttgtcaccatccctgagacagtcctgacagtcctactgatgactttccagatgttgtcaatgtggagtgtgttggaggtcctcacgcccaagtctaggatgacatgttgacgtggacattcctgtccttactggcctcattcttgtgtcccctctactctttgccccagagcttgctcctgtcatcttctccatacatcagtgtctgtccagcatctccagagtcagataccccagagttgtctggtgctctgggtgtctttgtcccttctagctgtgtcccctctccaccctttgtccttagtgcaggactgtgccctaagggttggtcgcatagtctctgatctgtttccccactacatcatcttgcttacttctacccagtggaatgttagtagttaaaaataaataaaaacgagggccgaaggatcagcaggtaaaagccatggctgccaagcttcaaaatgagtttgatctctagaaagagagaaccaagtgccgacagttagctgccctctgacctccacatacaaaccatggcatgctctctccaccctctgcaaaaggaaaaaaaaaaaagggaatgaaaggacttttaaaagggaacacaatgtgtgagcccagccatgcctctcctgaatcacccctcctgaggggtgggatcgatcagtaaagtgtaaacccgatggcttagctgtgactgttagctggggaccttgttctttgtcatcctagaagctccaggagggtaacatgggtggctgatgtagaggagtcagctttataagagtccaggcctcagaggaaggaaaggatggtgtttcctggtttaacacagccccaaagcctgagtccttacaaagggtccaagtcgggactctccagagaaacagattcaacaggaagcatctacctgtgtgagtgtaaagaggttttctataaggattagacacatggtttaggggcttagtcccaagactttcaaagttgatttggcaagctggaggttcaaggcagaggatcacctatcctggtccagccctatgtcggtgtcccgagacccaggggagctgatgacctcagcccagccccagtatgaacactggtaagcccaggagcctgggaggagcttctgggagcaagaaacaagcccacgttcaaagcctttagtcagtctttccttctattcagactttcagggcttaggttgggctcacccaggtacggactttcttagtttcacttcctgttttgctgccatagaaaacccttacaaaaacaacttaagtgtaaaggggtttagttacaggaaaaatgatttattttggcccacagtggcaggttacagcctgctaccgtcaaatctagaagccactagtcacagtgcatccacatttgatagatccccacatattagagctcagcttactctcaacccctggacaaggaatggtgctgcccacagtgggtaaatcttcccaccccaattaacacaatcgagatacccctgccggacatgccccaaagtctgcctactctagataatccttccttgaagcacccttccaggtgcttttgacagttgaagctagccatgacagccacctaccttccttagctcgggcattgctctcatccccaaacaccgtcagagaaacacccagagtcacatgtgaacaaaatatctgggtacgcagtggcccagtcaaggtgacacataaaactgatcatgtcaggtacacaggctgtgcaccttggaaagggtgagtcacaggggctgatggcagagcccttagcatagaatgcttttcccttgctgtagaccatgctttcttcccccaaatcttattcatttctatattccccagtacagactaccattgtttgttgaaaacactgagaattcatgtatgtgtagaatgaaatatgaatgtctactccccatgtatgaaattctcaaaaataaaggaaaaattaagaatattaagatgtactatatacaaaactggatatgacgttgtatgttattaagtacttgtagatatcattaaactttcagatactttatttctatttatgaattcctatatgaatacatgcatttacctaagcttattcagatacaaaggaagatgaaaaagtttacaaagctcctatatatttccttgaaattttatggcataagcctagtgcgcatcaagcctgcatagatggagagatgagttattatatgtgtgtgtatacatatatatatgtgtatatatatatatatatatatatatatatcaactcaaaagaaactaaagtacatgagtctcttatttgtaaaattcacaagctcttacaactagcaactaaaataaaatttgaaccaaaaaaaaaatcctagtttagaaaaatacttaaaacatttaaaatccaaaataagagagaaaggattgagctttccggtcccagaagcctgggtttccagagagaatatgtaaaatgtttttagtggtctctcagaaccactcctggcttcctggatcataaggcatggtcttcaggaactgagcctctctttgttgctgttttgcttctcatctttttgaataaacagatgtgtggttttcttttcaagttagttacttctgagtgcttaaatttaaaccctcacaaaataatataagatgcccattaaactaggtgactggaatttttcaatttagtacatacccccttttttctctaatgccaatttggaaagcaaccttctgaaggtgatccctgttttgtcaactgtgtgccacacaaggatgctgggggcgacactcaaggcctagtacacatgaagaatgctccagtgctgagccacacactcagccttactactgcttctggactgggactccttggcgttaaggccagttattcagctgttcatctgggaaggtttgcatgtttcaggctgaaggaggttaggatggggccgtgcttggttcccctctacacctctactcctctcatctagcatgaaatcccacccacacccaactgcttggaccactctgtgtcagagtcactggctgctattcctgcccaggagaaattcatccgatatacattttgaaatacctgctgcaactgttttacctgggcaacatgtcctcgtaggtcgtaaaacacacttcagaaggcagttggctctctgctcctcctctgcagtttctaggccctgtctcatccctcccccatccctgctctaaagcaagaagctttcttgtgttaacatgaaatataaatgtttaaaacatgagcgtttcatacttggaaatggtattgtctgtggaggagggtgattttaggtttctagatattaaactgtactgactcatttgttcttaaacaagtcgttctctagttactaaaattaaccacacacaaaaaaataataaaagaccagagaagcttgaaaaagaagagaagtaggcacagaagtccttaaaattagaaagccagggctgctctcttagcatgtgctgtgtttgaatgatgcgccaagattaaggtaatccactttaaccatttcctcccactaaaatctgggaggtcggaataacttcatgtacagaaccagaagcgaaggaagaaacatggcaggtgttttaaaaatttgaaatgatttatgaatataagagaaacagactttttaaaatccacacaccactgccattttggagttgtgctctcaggtaccattttacaggcagtaaatgtctgtgaatgtggcagccggacagtgggggagtccagcaaagatgccttcggagcagcctctggagggctcctcgcttgttcatggctggatccccaatctggctcctcctctacacaacagccagagtgagactctgcaagtgtagcagatcagtcacttctgtattgtcccacttgccagctattggagtgcggcatggctcctaccatgcaggacaaagcccatgacagtggtggcctggctcctgcctacttgctgaccaagctcagatcttccccatctacattaatatcttctattaccctgtttagatggtgtgcccctggggacatgtctttggagcaccttccattgttacaatgggtgtcctattcctctatgatggttttcaaaccctccatcaccttctgaaaccttggcactcagtaattaactttgtcttttcattatcatgaacacaacacaagagtaggaccttatcttacatttccatttaacctaaaacaatacctggtacatggtaagtccttgctacatgtttgttggatatacatacatacatacatacatactcacacatacacacacacacacacacacacacacacacacatatacatatataatatgggagatgaaaaatgttacaaggttttgtttgcttcctactaacaataaagggaaatatcataggactcatggagatttttctttatttttatattttctgactgtaatgctgtaccacatagtcataaactggccctgccaaggaagccagggacttgtcctgggattggatactatttctgaaacaaaaagactattgttcacaatgttagccttagactatgtggcctttaaaactattttaaaatacaatgtatcttctcaatcagagtatccaattaaccatcagattctaaacggcaaccattcctgacacgggagataaggggattgaatttagaactttgagaataatctctctctctctctctctctctctctctctctctctctctctctctctctctctctctttttgtnnnnnnnnnnnnnnnnnnnnnnnnnnnnnnnnnnnnnnnnnnnnnnnnnnnnnnnnnnnnnnnnnnnnnnnnnnnnnnnnnnnnnnnnnnnnnnnnnnnnnnnnnnnnnnnnnnnnnnnnnnnnnnnnnnnnnnnnnnnnnnnnnnnnnnnnnnnnnnnnnnnnnnnnnnnnnnnnnnnnnnnnnnnnnnnnnnnnnnnnnnnnnnnnnnnnnnnnnnnnnnnnnnnnnnnnnnnnnnnnnnnnnnnnnnnnnnnnctcatatgctgccaggtccctaaattcaatttcaagtgactactaagattaggatgatggcagatgttatgtgcagggagcacagacacagagggaatttaaggaatcaaaactgctaatactttgatatttagaatgatttgatttagggatatttttacatttaatcttgtcagtacaatatgatttttgaaaagttctaaaattccactgagccatttgtgccttactttaatgctagtagtgcaagtctttgagactgcaacaaattgctaccagtttctcagatgtcatctgtatgaaatatgaccacccgtctgagaggtcttccctgctcaacagtgtgggatgaagccgtttggtgcacatgtctagactgccacatgagcagccattgctcttcacaactgaaccacctcttcagcaccaagttattcttaacgtttgcttgtatccccaagattttgttggttgtttctgcctggtgattgtacttctaaattgactggtttggcaataatattttgtttgatagtaagtaatattttaatgaaatatttttagttttaataagggcattcagtcatgatatttttattgtatagctactcctaggagtggggtataatggtcagttggaacaaatcaggtgcatgaatgaatccactgttcaggaaacaacttggcagcattcagaagtaatagagcatcccaaagctaaggggccacttccctgatggcccaggacagccagggaagcatctgaaggctgtgtataggtattaaaaggctgaaataaccaaagcactgtgggggtaggggggtcatggcagaaggacctggaaaacaagccaggaatgctcaacatgcgaacaagagaagccctaagagacaaagagagctgccttcctgagtagaatgatggattggcctttggagcaccagagggtggtccttactcagagcttagcatagtccccaagaggaagccccaatagataaatgtttccagcactagaaggaattcagagcctggagccccgagaaacaagacaagatgtgccagtcttgagctgtgctgttccagaggggcccaggaagagtgccaggtttccttcaagtcttattcatccttcaagattcaggtttagccttggtcctctcaggagatttcccagtacacccctgccccttcagcatggatgctattccccagccccttctccacctgcatcctgctgcctcttgtcttcttctctgtgcacagtcctttgagacttccaaaccacaatgctgtcatagcttctccatctctattcatgtacggtgcatggtccctcgagagcaaagccatccttctgcctagatgtccttggtgcttacagggaatctggctcataggtggctttcaagttagcaaagaaatgaacaaactccagtgagattcattttggcttaaccttgacactgacagaatttctgattttactttgttgacaccagcaccaccagcttttcctgagcccatcatgctaagagtggcctcttagtgttaaggctagtttttgagaacaaaaagtaactcccagttctttgtgcaaatgccataaaattttaacatccaacttccgaagccccttgcaaaggtaagaaaattactcacaagaccattctgcgaaacacttcatacctttcagtttgaaagtgaaagaccccatctctgtcagtgttgacgatggcagtgtggactgtggaacagcttggacgctgagaatggacgtgatctcaataggcccccaggttccctttgtttattgaaacagaaacaccagggaagaacaagactagctttgaaaataacttggtacacacataggtgaagtagccttacctcccagtaggtagccgagaataaatgggtctccctagctgttgttccaggatatttttagaaagaaagagccctggtagaaaaataaatgtaaacaattcaaagagaagagaccccaggcagtttggtgctgctttttatttctgtctcatcaaggggagaaaagtagaaactgagcaaaacccatagaagggaatgggggtggatcttcctcccctcataggatgctgtggataatgtacggtttgctctgaacacgtgtagctcagagggcagcttatagacaacctgaagaaccttctacaaaattcctgttcgtattgcccattgcaattttatttgagaaaagatttttgttgctttcatgatagtttttagcttctaaatgaacggcatttatttaccatagaatttgaactttcagtaccattctagtactgctctcaaaaggcttggtttctttctttttttcttttttttttctttctttctttctttctttctttctttcttccttcttccttccttccttccttgttttctttctttctcttccttccttccttccttcctttctttcttccttccttccttccttccttgttttcttactttctcttccttccttccttccttccttccttcctttctttctttcttccttccttgttttctttctttctctttcttccttccttccttctttcctttctttcttccttccttgttttctttctttctctttcttcctttctttcttccttcctttctttctttctttctttctctctctctctctctttctttctttctttctttctttctttctttctttctttctttcagaatcttctaaggggaattgatgaacctgataacctaattttagacctcctgaaatttggcagatggatggtatttatagtgttctgaatcagttcctattagaaacttaaaaatagttacacattagagaatatatttaagatagaaaagacttttttttttaaccctaaatccagtgcccgtagatttgtttttagcaacctaagctgtgtgtgcattttggtagcaatttctaaagaggctttttgtactctctccattctctttcctgtgtgatgctgctgttgtcatggaaacagatcttggagtcactttgttatacagcgtaagggactccctgatatggagattaaccacaggttgctgtcatccacacacagttgtgtatgatgcattttgtacaaaacttagaacactgtgtttttgaggtcacaccatttttgacatctgtgcatgaagcgcaaacacatcagggtgtcggccatgggctccctaaaatgggctcatagtactcctttcctaagtaagtgaattctgtccctgttcaaggcagacttctcactacatgtccagttaagggcagcacgttgagaaaggaaggcttgggtgcttttgtttgtttgtcttaagtgccatgggaaaggaacatggcctccaatgaaggggatttctgtttaaaatatccagtctcatgtaggtgcatttggctcctgggatgaaaatgggctgtgtacaatgttgtgtttgggtgtgctcagagctctggagttagaaaggtttatcaccaagctttcatgttgtaagataacccagtcagatacaaaagcaggacactgcgacattgtagctttggtcatcggggtgtgagatgggatggatgctcagcaccggaaggtgccgtgggctctcacggccacaggattgttttggcttcagtttttgtcaccattggtggctcttcacagtcatactgaaaatgtaatagaggaatagaagacttgcagtgtctggtgtttggtagatgctaatccccctactcccggtccatttggttttcctagggtggtggaccctgaagaaacttcttagatctgcagcctcaggatcccctgggaacttggtagaaacacagagacccaggagccacagaagagctggtcacaggctctctgtgtgaggcactgtacttgggaagctttggcctatgacactttcctgggaatttcagttcctattgctgatgttgtcatggggtgggggtgnnnnnnnnnnnnnnnnnnnnnnnnnnnnnnnnnnnnnnnnnnnnnnnnnnnnnnnnnnnnnnnnnnnnnnnnnnnnnnnnnnnnnnnnnntttattttggctatgattgagtatagctcttattgatatttaaggctccagccctgcagtgagctcatccatgccatggttcaaagaaggtatgggatgaggtggttttgggctcttgggttgtgggaagaacagaatgagaacctctctgtgtatttatcttactacccaggagcaagataaactccagttctcaacattagccattatttacctctaaattccaagtgtccagatgtattcgccacagtcagctcacactttggggtcaggctgaagaagtaattaatcatgttcttttctaattccaacgttattcgttctgacccttgtgggacttggtttctgggctttgcaaaccaaaaggtttatcttaggcttaccacaagagagggaattcagtcccaaatgaagctagtttagagacaacaaaattcatgtaggactgccattcctgaattgactgactttaaaagcccaatttaaaaccaagtcttgtgatgattttaaagtctactggcactgggagatgaggaacctcatctcagagacatttcagataccaagtgtgacatgtggtatttgaaggactctcgggggatctgctcacttgaaacagtgaaactgtagcttcaattaattttgacactgggtttttctaaaacagtctctgggctccaagaatgtggcataaatgactcgattaagttcaattcttttctaagaaacattgaaagttaattccccccacccccatgatggctattcttggttgtcaacgtgactatatctggtactaaaaaccaaacctagagggcacacctgtgagagatttttgcttaatttgaaataggaagattgatttctaatttggaccttttagttaggaacacacatcttcagtccatccaaagacatgccttcagtccagatctggagttggaaagatacacctttcatttgggccacaccttctgctggaagcctatacaagtttatacgtggaagaaggaagtttctgctcttggcccgtttgcccttgccttgctagctcatccattcattcactggcattagagcctacttcttcaggaatccagtatctgctgaaccagctgagaccagccgaacaccagatcaggcctcctgaactgagaaattactggattgttggactttcaggtcacagacagccgtgtgtgtgtgtgtgtgtgtgtgtgtgtgtagaggaattttcatccagcaaaatggctactctagcaagggatcatatccaaagacctaggtctgtgtgatccagctggagatgtgtatgtgtatgtgtatgtgtgtgtgtttgtgtgtgttctgtatatctttaatccccctgactggaaggaatacagacacatctttagtacacaactttaatcccaaacaatgatgtctatttgaggggcagacaaagtgacaaatcagagaaagatctgacagaatgaatcagagataggataagatgaactcctacaggaaaacacaggaaaaagaggctacttaagaccagcaacagagaaaagggggtggggtgtgtgtgtgtaagttttacagagacaggttgcagagagagcaagctagataaaagtgaagacagaaaccagagatgataatgagccagaagattaaaacatattgccaaaatttatatgagcgattcagtcagaagctgagagaagccagattgaatcagtcagcttggaatattaggttgtatggaggctagaagcttccggggttaggcctaggaataattagaacagacaaagaaatactctgggctcagctcaagctgtgtattggcacagcttggatccagctcttatccctccatcagaggaaataaaagagacatttacatatatatgtagtatataatttatgtaatgcatatatagagattcattttgtaagttctgttactctgagaattctgactaatagacttccatttcttgagctaattaggatacttaaaagttatcttccagttaggaagggattaatctagcctaactgggcccatcttgggatgatgtctgtggaaagaagcccagcctgcagcagactgagtctcctgatggggagttgagcttcttgggcttatggatctgtaccatgtgtgtaggaagagaaaatgaggtctgtgattgttctgtccctcgactctttggaaggcaggaatgctggctcaggaaatgggagacccagtttctagctttagacaagtcaaaatgctgcatgttcttggggaataagagatttgtgcgaagaaagaatttagaagcagactcatatttagttcacctcagctaatgtgcattctctctccctttttaacgtgcgtctgtctacatgatatgtagcgtgtgcgcgcttatgtttgcttgagtggacgcacatgtgtggaggccagagggcaacctgggatctttatcctcaccttccagcttgtgtcaggcagagactcttattcactactgtgtatgccaagctagctggtcacaagcttccagggacttctctgttgtcacctcccatttcttcatagtcacaatctggcttgtattctgtatggtggagagagaagtattccctccccatctggatcacagatctctccagcacaaagctcttgggtaaagtgcaggcagagtgattggccttgtgtctgtgggtaatactgttagcaatctctggtgcccagggcaaccctgagaagccagctgggtcagggtaggactacctaagctttataaagccctctctttttgctttcaagcttgttatttctgttgacttgttatttggtgctattttatttaaagctctttagctgagggggaccttgaactctgactttcctgtttctacctcctaagtactagaaagcaacaccatgtcagtttctatgtaatgctgtggtgaattgaacccagagctctgggcatgccaggcaggcactcttccaactgagctacattccaagtctctagtaatatctttatgggtttttaatctctgttatgttgcacaacaaaagagttcttgtctatggtcaaagatatgagaattcccagaggaaataatggcagacgagcccaaaacagggcaaggtgacatttggggacagggctggaagcttcttgtgttctcttctctctctctctctctctctctctctnnnnnnnnnnnnnnnnnnnnnnnnnnnnnnnnnnnnnnnttctttgcttacaagtagagaagtactttggggaatagggaccagcaactcaaaacaaatgggaagcatggtgagagacaacagtgcaagacagaggtcatgtgtaaaacagtgcagacaacatggctagtctgaactttaagaaggaggtgatgtcagaccatccacttgggtctgtcattagctggtgtataatatatacacatgtggcttgtttaaaaatcaaagtgatgtcaggcagggtggcacatggatttaatccaagcactctagaggcagaggcaaaggcaggtggatctttgtgagaccaaggccagcctgatctatactgcaagttcctggacagtcagcactaaataaagaggctgtgccacaggaggaagaagaagaagatgaagaagaaggagaagaaggagaaaaaagagaagaagaagaagaagaagaagaagaagaagaagaagaagaagaagaagaagaagaagaagaagaagaagaagaggaagaggaagaggaagaggaagaggaggaagtggaggaggaagaggaggaggaagcagagcgggagggagagggagggagaaagagagggagagagaaaggacagggtgggtcaagccccaaagattgagtggctgggcagcatccactgtgtgtccactgtgcggcaccttggactctgctcctgtgctgggctatgccttgacaagatcttcagtgccatttcttccccagatctgttatggcttctggagccactgttggtgctctccagtttccaacagtgtcgagaagttgctatgggagacgtgaggagaagtaggaacagaggagatgcactctgtgtttgggccacgtcactgggaaaggtcgaccttgagtatgctcacactgccactttggcttcaagaaaacagatgcaggatcattcagtcaatatagaatttcaaaatataggtcagtgacccccaaacccagctgtccagttgaatcttgtgagttactttccagaatgagtttcacaggctattactccacttacgttgatattcatcccagaaagaccaggatgaaaaacaaggagaaaccttgacctccgcctcagcacctagcacgctttctagttctgtgacctttcaataggtcacttagcctgcctaacccagcatcctcatctgggggcagaagacacggagcttaagatgactttaagaaaatgacacacatgaaaagcttattgctcacatcacaggaatctctcagaaaatattaactaatttctattcttaaccagaatttgcacatcaggtgctggcttggtactgtggaaatgcgcaaaagatcaagagtctcgcatccctccctgtcgattatctgactgaaaagcctggggaagccagtgcacacgggtagccagtagggtctgggacagaaaccactctgcttgaaagttcgaattacaagaaggtgccaaaaggatgtaacttgcatttaggcgaggttctgggtggtgctggagaaaatggaagaggctagaggcttgagaggcttttcagagcaggcatccgagggactcacaacgagccgaagtgctttctgacgatgccgacatctctaatactagactctgactaattgctatttatagctgcttgtattcaaaagcttgtttatgccgtaagtggggccgaaaaagaattgtcagctgaagggcgtggaaagcactctgagctcagagtctgcttttcaaaatccatgagccatctccactcctagctagctgggtgaccttagacaagctaccgggtgtgctctgttccctcactgaacacaggatgcagggtggagcttgtgctaagaaagggaacaaccgccaggcttctgtgtctaacattcagcatccatgcctgacaaaatgccctgcaagatgctggttatatgtgctcagtctttaatctcttcttctgtctaaaaggaccgtcctctatggaagactgcttttcaaatgtaatacccacattgaggtttctataaagaacgtttgggttctgcttatctgcatagacaacgtacctcatggttctgttagacgtgtcttccctcaccaggttcatctcttcccactccggattcttctgccaagagatcataccataatgatgatgccacccctgtacacagaaataatgcaagatgtgacccttgggtgtgtaaggcatattgcaaagtagccacaaaccttcaccttagacagcgtgttctttcgtagggtgtgtttgccccttcatcagacaggaggtggattctatttcccctcactcagagactgttatttcctcagccagtacaaggcaattgaagtggaactgtgagagttctcaagtgaagcattcgtagaccccacagtttctaatctcatgcactctctggaagcttcttggaggctgccctgcctgtcctaccccaaagatgggaggcatgtggagcagagaggctcccctaccaaggcagcacttttctgccagaccctcagcttcccacccccaccctttctgaagcagccacataaaccccatgaagctcccacatgcctgcagctgcacggggccttccacctttaaatgtcagtcagtgtcaatacaaataggttgtattagtactaattgaaagtggtaaatatttatgcatttgtcaatatatattgacatattttccatcggttaggcgtgctgttggtttgagaagattggaaaatgccttttgcatattaaatcatcccctcagaggcagtgtttggagtagaaaatacctaaagcttggtttcccactattgtgtgcctctcatagggaggacggttatactgtgtcttcttcaatggcagaagagtctagggcctgtggtcctgctccagatgggtgcacagcatccttagagtgtccctagcaagccactgtactaagataacctggccagtatctggtttcattctggggactgaggcctttattttttttttttattacatttatcatcatcatcctcactatcatcaccaccaccatcatcaccatcctcatgaagagttgcgaatagacactcacattccacagaatctatctggaggtcagaagccaatctgcaagtgtcgattttctccttccattgtttcagtcctggagagtaaaccgaggtctcacaggcttcaagacacattgctttagtagaagtgttgataaatgtcacgactcagctacaggacaaaaatggatacccatcttcatgatttaatacaaatatcaacacttcactctccacatgcctctcttcctctatccctctacccctggattgagcccaaggcccctggcacttcaggcaagccatcttgttacatttctagcccttctcctttgatttcaaaggccatttgttgtttgtttgtttgtttgtttttaactcaggagaaagtccctccctacttgtataagatgtataagagctttataaacaatattttacttaatttccttgctaatgacacttcatataaaacaaacaaataataaaagccattttggttgcttattgtcttaagttgcttattggttgcttatagtggttatatgtcatatggtaaagggactggtctaaaattggtatatggtaatgggaaactttgagaaattgtgtgtgctaaccatttggccacacagagactgtatgcagtgagaaaaactagtctacatgttacctaaatgaaatgtcaataaagccttttagttgtctttgttctttaggaccaggtcttttatagtccaggttggcataaggctcactgcatagtgaagcttggctgtgaactctgtatcctcctgcctctgccacgctggggttacaaggcatgtaccatcatacctggggaaaattaattaattctttttccatagtgttaagaattaaacctagggccttgtacatactatacaaacactaccactgagctacactctatcctaagagaaaacatattagtggaaggaattaataaaacaggtttcaaagtaaatatatagttgaagtatatgtgtgtatgtctctctctctctctctctctctctctctctctctctgtgtgtgtgtgtgtgtgtgtgtgtgtgtgtgtgtgtgtgtgtgtgtgtgtgtttcagagatgattttctgtggcaatgattggatggctcttaaataaaataaacaggtggtttacttcctgataaatttgtaccaatttactgtggtcacctaatgaaccaccatagagttctgtgacttttaagcaaccatacttctctcccataatccacaagtcctgggctccttgttaggaagctgtacatctattatattccatggtttcccacccccccccgtcctcctagaggaggcagctagcctggctgcattcaacagctagaagtaccacttccttctaagcctgtaatggggactctgtcacctcttgtcatatttgagcaagtcagtcacaagactaagcctaaagtctagagacataggaaagcaccctgtttttagggatgcgtgttccaaaggagggagtggccagaatgaggagtgaggagctggagctggtcatcaagtctgagtgatgctgtaaggatgaacaaaagataaagcatggcagagatgggaaggagtactttgtgtgtgtgtgtgtggggggggggcatcactatctgaatatcattgtaccatggcttgcaagctgtagttcattgggccctattcctctaaggcctaaccttgttgaatcatgtgccattcccatctgttcccacattgcctgtgttgtgtgtagctgtctgttggtagcagtgtgtctgagaatctcagatagaggttgtatggctacaaaatgtagatgtttaccatgtatctctctgcagataggattcggtattcctcttttacagatgcaactaaatggtttaagagaagtgaattcagctacagttctatgtctctggctgccccagttccttttagggcttttctgataagctttacattctggttcttgtgtgtttttataaaacagttgaaataaagcgataatataatcctgatgcctcgcttttgttacacgcagccaacacaaatcacacctgcaagctacaatccctcaaagttcacgagtcttggcaaattacagaatgcagagcacagatgagggaactagttgctaattttgctttgctattaatgttttgtggctgtgagggtcattcatgatgttagacaatagggccattgtttctgttctgctgaaagacagtctgattgtgtttttatagaacacgatgcagacccactctccctgatcccaatgaaaaatgccacagacctttgtctgcccaaaccgccttctgtcagctttggggctgagtaggggctgattatccatggctaatgggttagtaaatattcagactgcttcctagtttcctttcttgctgtatgtgtatgtatgattatgcatactcatgtatgtgtttatgtgttatgtatgcatgtatgatttatgtatgtgtttatgtatatattacatatattttggtgatgctgttttttagcccagggcctcaatctgctacacaagtattctgaacttcacctccagccccccctcttgaatgaataagtaaacttcttgtaatatattacaaaaaaagttttaaaagacaaaaactatccattttgcattgcttaccactatgatgacaagtacaatgattttattaaatgggagacctttatgattaaaaacaatcacttcagttactttagataaaatgtttttaaaaatgtaacataaaactgctgcaggcacactgttacaaatatgtagcagcagtgtttgtttacaagtatagaacaaagaccctctaagacatgcacgtcctagcttctagagtgacagttctcaaccttcctcattctatgaccccttaacacagcagttcatgctgtgatgaccccatcataaaatcattttctttgctacttcacaactgtaattttgctacttttatgaataataatgtaaatatctgtgttttctgatggtctcagatgacccctgtgaaaaggtcattctatcctcaatgtggttgagacccaacatttagaactgctgttctagaaattgtggggattatctgtgctgcagaaagtgatttgtagatgttaaagagttaagagtcttgagaggaaagatggttgtggatattttgggtgggccttgtgttatctcaggggtccttttaaaagtaaggcaggaaggttgaaatcagagcaggtaaaactgcagagggctctggatgctgtggttgaagatgaagcagatggtacttctaacagccaaggaataagatggcctctcaatggtaagaaaaagcaggcaacaccaaaaattaaatagctttaaaaatgaataatttcaagctgggcagtggtgctgcacgcctttaatcccagcacttaggaggcagaggcaggcagatttctaagtgcaaagccagcctggtctacagagtgagttccaggacagccagggctatacagagaaaccctgtctcggaaaaaaaaaaaatagtcatttcctagtcttgccccatctctctagaccctgtgaccttgtaaagtgtcactcctagagtaaagggtgtaatgacactccttctgtcctctgtggagctacagtctgggctgtggcagttatagatctcaggctccttgtctaccaggctgtgcgtgtaagggcagagtcaccatgacttagtgaactctttctggtcttatggtggggtgctccccatggggggggggggatgattccagaatgcacagtcagtccttccatcccctttcacaagtaaaaggagtctttaaatttttttcattttctttttacttatcccaaatggatggttttgtttgtttgtttgtttgtttgtttgtttttccaataaaaagatgctcctggtggaaagcccctaatggcagcaccctagggatgctgctcattgctgaagtcctcatgccaggtccctaagtactgcagttcctggcttagctggctaaatcatagtcaaaatcctcttcctaaagcctcagaataagccactgattacactggcccgatgtgcaggctaatcaaatgctcttgatattatagctgactcactcagatcctctcccccctcatctcctgcttccatctttatctgcccttgcagatcttctgcatacagagaggtgacctgagatggggaggacataaacgccgtcagtcaccgtggaccaaataatgagtcacacagtctcggctttgggttgtctatactgcacctttgacggttcttggaaagtcagtgatttggtttggctccaatcccaagttcagtttcctttggttgcttcctgcataatgtgtcctggctggaatccttactgtcttggggtttgtcaaggaaagattctgaaacatcagaatggagatgcgtgtcagctgtttttccccttgtagtgaaaaatgcctgacagaagcagcttaaggaaggaaatgtttgccttggctcacagttcaaggattcacagttcattatggcgggaagacttgaccgctgactggtctaagtatgcccacatctacagtcaggagtagggggagattaattctgatgcttaactctctctatctttttttaaaccccagtagttcacagtcccgaaccctgggatatttaggataggtcctctcagctcagctatcccttacatgcatactcagatgcttgtatttctatggtatatcctaggtattatcaattgatgaccaacactatatttgaatatatatacatatatatgtatatacttattaaatgtatcaataattattaatatcacatataaatatatatgtatgtgtgtttatacaataatatatattgatagtctattactgtatactatatgtgtatatatttacatgtaataatatatattctatcatggccttatttgattcaagcaatgtaaggagaaattaagcaaagaatatactggctgaaaatatcccgtatctgaaatgcttagggccataagtgcctcatattttacaatgttttcttatattttattatctgatcattcctaatgtcccctctgaaatgtaaaaggcttggagcatttaatttttgcagatcaaagatgcccaatcttttaaaaattaagttgagagacttcagaatgacaagtcttgcaaacacttgcagatatgaatggcagaataagttcacattctgacacaccagcagtttttgaggcttcctccaaacaggaggactgaaaatacttggacagtggagaaatgtcagccagcatctgtttttgtttgcagttttagttttgttttgttttgttttgttttgtggtttgagtttgttttctggttgtatggatggctgggtataaaaggcagaacatggactttacagtttgctgcctcttttacagctctccgtttgactcttgggttctaccagggtgaaaatgaatgtttttgtagcatcctctccctgttgcctgctcctaaaaaaggggaaggagacacaggctccagatcactgtgcacttgctgtcagaaaggtcagtttcatgtttttcaagcacaggaaaaaaagacccctggtgcactagatgacattcttagctcaagccgggccagacaatccagggatttctttcttgcatttctgttacaatttctatgccaccatggaccttgtggaaacagctgcaagccaaagcatgaatttcctgcctgtcatgcctttttacatccacgttgtcatcagctgggctttggcatgctctatagagctgatggattccaggcaacatggtatctttaagtccttggagcaaacaggtttcagaacaatcggatttgtccccaagagtgtcttcatactccttatcccagtccttgaaagtttggatcccatgcttctagtggggagtttgatttccctggagatgatctgtaaatagatctaaggccaagatctcagctacagtgcatgtagtcagcatccagagccttctgtggactccctcctgcagttgctagtgccttcctatcatagcaccgtgttctacatctgagcatatcagggtgaatttccaagggaaaaactacacttggcttggcctctggggatgtgttttcttcctagagtgactcacttctagtagaagcctctggtctcttgggtctctctaccagctttgcttaggagagattaatggagccattgggccttttaaaagttacacaatagcttattatctttggggtggttgcttttcataaggctgctactattggtttttttcctaatatcattgactcataattttatgtttttgcttatcttttttttttaagatgatagtctcatgaagtccaggctggtcctgaatttgcagtgtagccagtgatagctttgacctatgatcttctgactccgcgtcttaagtgctatgattaaaggtgtgtgcaaccacaccactgagtttatgtgaactcaagggatggaaaagtcttgagtaggatgtaaatgtagttgatcagccaaagtgaattttagagagtgagagacttgaagcaccagctatccctgtgtcgtatcttccagataatgccctttgtccctattttccatgttctttgttttcagtaaaattcagaggatttacacaagcttacagagagaaagtcagaggtgggaatggcgtggttgctaaagagcttgccttgcatgcatgaggacctgagttctatactaatactcctgtaatgtcaagtgaagcagcatgtgtttgtcatcctagcactagctccggggaggcaggaagatctctacggttgacaagccggacagcttagcttaatttgtaagctccaggccagtgggagaccctgcctcaaaagatggtggccctgaggatgacaccctaaggttacaccctggtctcaacatgtgtatgggcagcatagacacaaacacacacgaagaagagtcaggaaaaaggctctttaaaaaaaaaatcgtacatgctgataagatggctcaatagagccagacctgacactctgcagttgaccactggatcccctcagatgtcaggaaagaaccaactcccaagagtctcctttggccttcatcttcttgccatagcatgtgcacactcccaaaataaataaaggaagtaaaaatgtcatcgaactgactgggatttccctgccactcttcttgctcaggatgactgttcttggctgttctatgagaaggagcaccacctctgtgcccagttccataccagtcaggataggctctcttttgcccttaggatagtgtcgtctagctcggatctcttgaagtcctacatccctccccaggactcagcattcgcctcctctgcatccagtggttgcttcacgataatcatcaaggccccccgtatcttgaaacaaatcacatccaagacatgttaactgcttggcttataattaattcttaatttggccaagggagcaaggactgtcttcagagcaggcctcctgctcccattcttgatttacagaccaggaatgaccaccagtttttcccatctaaggctttgtttcctcattgttagtcgcctgcatccataaaagacccagaggccattgcagcagcccagtggcgcccctctttctcttgttgacttggagtgggggaggaggagtggcagaatgctttctgctgctgcagaggagttagttctgaggtagaggctgccgggtggagagaagccgtcttctggacctttgtgtgaggggcactgggctctgtggggcaggagctccctttgcttctctaagcagccaccatctactgagcaccactttggggagtaagctttcagcatcctgcctggctggctgtcacttagaggaaatgtgggggtcatgacctttgttagatggctgccccatttgtaagtggtgaggatcgagtacattgactggaattgcttgctgaccagggttttgtgttggagactaaattttatgtgcgcctattcccctttgatggagactgcagtggatctgttcttaaggggggaaaatcaagatccctagtgactacactgtctgctgtctgtctttggcgcatccaaaggaagttgacttttcaaccctaaggtgtctcacttcctcttggattttgtattttgagttttaaaagccacattcgacctttcagaactggggcctaacaaatttgaataacaaacgtctaaagagagacaagagaccttgaaggccttaccttcccatgcctgtaggcatcagaccattgaagactcactcaggatgcggatgtgcctaatgtcctgtgatgtttgtactggtccccaaaggattttgatccgaacatactttagttttgctgacaccaggccatcatttatccacaccaattacctaagtaatgaagatagcacatactcaatggctgatagacacccagtgcctttcccagaacattatgtgaattagtgtctctgattatccccgcactctctggggttgcagagtcatccacatttgcttccccacgtaagggactaatgagagtgggtttgataagggagaagccggatctgagaggtcgccctgtgatttgcggttcgccctttaccagaagctctgggccatccttccctactgcatcttgaatgtctcatattttgccagatggagaaatctcatcaaggatgaggcccctacttaaaatgtccttgagtatatatggcccatctgttaatctgtgtggcccatcagatccgagctcttaacttgggccggcccagagcagggagagagaaacactggcatctttaatgatggttgtgaaacacaccatggcaggcatcacctttttttgaattttttttctttttacttttatttctttgtgtgtatgtgtgcctatgtgattttagcatcacatgtgtgcaggtccctgtggcgactagaggaataagttggatcacctaaaactcaagttacagtggttgtgagctacctgctgtggggctgggaacagaacccaggccctctgcaggaggagtacgtgcttttaaccagagccatctctctagtccctgacagattctcaagtctcaagcccggtatacctatcttggagttctatgcaaacatctccgccatgggaaaaccccgtcagatctacgttggcccagctttcttgaggctgtatctttcattagggcagacagcagataccatggcacctggggtaatttccgagacacctgagctgcagagaccccttcttcatagctgtcacatagcttctatttgttccattcctctattcacatgtttggcggggtctctatatgttctctcaatagcaagaaaagctaactgaactcatgagactgcaaaggtctttttttttttaattttttttattttagagaacattccattccttctggagacaaaggcacacagctgtggagttgttcacctaagccatacctccagctcccagacttactttctgttacaataaatgcctctatttgaaataaaggtgaaggattgtgtcaaaacagagtcttgcctaaaacacattgtaaccagcatttctttcccttcccttcttactaaccccctggttattaattaaattaatcacttgcctgggtttcctgtggctgttggcttctgccctctgatatttgcatactggcgatttctatttcttatgtgggttttgaataatagcctttcttttattgaacgttccccatgtctcccactctagcatggcttgcaatcttctcagcctcctgccaatcagagctctggggggtaatgctgtactgtgctagcagtagaagcccctaaaggatatgtaagaaacacaaactatctgtgtagggccctgcctaggtctgactaagttcaagcacgccattcagacgggtcctctgctgaccaatcagggctcattcaacaagaagccacagagaagcctacgtgatcagaaagcagaattcacaaggaaaggctctatgaggctataacacatattcaattatgcaccccgagaaaagaagaatgatgcaaattaaaatatctgaaatatggttagcctactgtatgtaaacacagttaacctcagagtcagaagacctggtttgaagcctgagttccgcacttccggcttccatcttgtgcctcttgtttcttcccttggggctgtgaatggggtggctgctgcagttgatgtcaccctcaccaccagtgacagcagtagcagctataaatacttgtggttattgctattattatcactgttattagtagccggggctaacaagacaggctccatctgctcttcccccatgggaaccacagtttcctgcagagggtcctgtggggggtgcctatggatgcctgggacagatttaggaagagactgtgatggcccaactcctgtcagacctttcagcctcctgtggacattagactgctccccacttaggggaggaggcctggggatgactgctggagacatggaggtgaagaacttgccctcaacctgcaaacccctacagcgtacccagtgagcctcaagactctactggcagttcaccccacaatttctacagggcagatttcaagaattcgctctcagcagggcccctctgcttctgagatgcttatgtagcaatttaatatgcagctaggtatggaggacgttggcttgctcaagatcagaggtgacaaaaggctgcagtatctcaacttgtcccacatccatccctttccctgtgtatgcgtgtccatgtgtgtgcatacgtgtacagtgtctatacaggaatgttcacatgcatgttgggcaagaagtatcaagtttcttcctcaactgcttctcaccttacttcttgagaaaattactcgctgaactgggagttcccatttcagctaaactggctggacagggagccccagggatccacctatctctgttctctccagctctggagcacccgacttttagtgtttgtgtataacacacagctgggcacctgtgtgcctgtgtgtctgtttgtctgtctgtgtctgtctctgtgtatctgggtgtatatatgtgtgtctgtatctgtgtgtgtgtctatctgtcggtatctgtgtgtttatgtctgtgtctgtatctgtgtgtctgtgtgtgtatatgtgtgtgtgtgtgtatctgtaatctgtctctgtgtgtttgtgtctgtctctgcctgtctctctgtgtacatctcatatgtgtgtgtgtgtgtgtagttttatatgtgtgctgctggtgtttgtgcctgcacacatacatggagattagaaggggtttcgagtgtccacctccatcacaaccaacctattcctttgagacagggtcaggttttctgggctgtagctccagctccagccctcctccagtctctgctccactcagagttgggcttacacaaacacatgggatgcctggcttatgtggatgctggcatccaagccccaggtcttagatggtgcagaaagtactctctacccctgagctatctctcctgccctgcacccaacatctgtctgtgtgtcctgggaatcaagctcaggtccccgtttgtacattgaatactttaccaactgagccattcagtccctgcttcctcttttgagggctatagtttgtaaggtttctcaaccaaggcaggtctttgttgtagcctacagtaaaagttattgagtgccataactattatgatctcccaagtgagaatcgttgaggaggaaacggtttgaaacaaacactaagcttgtgggtctgctgctgcagcaaggttagtcattagcagcggtgttaagagacagaactgttcaacgccaagcccagcctctgcttttatcaggtctggagctgagattttaaaattacatatgcacgggacctcttaaaaattaacatccctgggaagactcggtgctgacagcttttctctatgacccagatgctacttgcgtactgtgtggcgtgccatgaatcatataacccagttctgatgaagtgtgtgtgtgtgtgtgtgtgtgtgtgtgtgtgtgtgtgtgtgagagagagacagacagacagacagacagacagacagacagacagaccctctctcctccttactgctgcagtatagtctggtcattttcctgacccttgctaaagtgttctcccctttcctacttctgaagctcaatgtgtgtactgaaattgaaccctgcatgcctcctctgcatcgttttgatgcaacggaacagtgagattccagagccgacccctcgggaagcgtgtaaccagggtaaaggaccaggttcattgctcacactcacagctgtgaatctctcagaggtgctaggccttggttttatattcctcaagatgggagacttgctaatccctgggtgggctcacggataaacaagagtgaacctacagcatcggaagagctctccagtgagagggaggggtggccatctccatctttatgtgttagtgtgctggtggccggtctatgctctgtttgcagttatgagcacgtgagacttcaaggccgctttgctaggtggaatgggtgccagtgtgagagaagtctgcctttagtcaggaagcattccaatgagcaaattacctgacagcgtggcatgcttaatggacttcagggcattttcagggaaggccagtgtgccctcctgtggagaccaggctctctccagggcccacaccaaggccctcattggcacacaatcatagcagcagttaaaccctcttatcatctagactgtcatgaaaagaacagtaccctcccttctgaccgcttcagcatgtctctgttcacaggcagacgcactaggatggtgtctccggagctgagtatctcccgtcactgcgtcactgtgtcactgtgtttctgcaccacatcttccatcttcacactttcactgggtttgggtctgttttatgaccctctgctctcatttcctgtttgttttgtctgttcagacttctttccctcctggaaagcggctacctgggcaggcatatctgtgatgtcaaacacatgcttcaggcgcgaagtacctttctgttccgactgagggggccaaacgatgtaacaagaaaagcaaatgcttcttggggttcttttccgtggtttcatggaaccgttcgatcttaacaagaactgttaactttcaaatgaagtttttttgtttttctttttgtttgatttttttgtttgtttgttttgtttgtttgttttttaacatcagagaactacactgtgtgtggatcattctttatgtgaaagctgagtttcctggccctgggtggaacagaccagacctggctctaggtggcaccaattaagaaagagtgaaatgcagaaaacaggttttgaaaaggccaccacacttggaaacagaaatacgccatttctcctgcaagggtgaggggtggggggagggtgctcaggaacagggaaaatggcataatcaatttaatcaggtaaggctgccatctcttgagaaacccagcttgtgcccctctttcagtcagggcatcactgagctccagtttgttgccaggaagacgaagttcttccctcctgggaattccaggccagcaaacttttggaagtatctgtggcagcttgaatgctgctatttaaggcctgatgaagaggcagcttggagaaaaacctcaaaaataaatactctgattcatcattgttgttcaagctttccagccatcagagccagccctgggctccagagacaaagggtaacattcaccaggagctgttcagcccagtcaggagccctggcagcggtgaggaggcggacagggaggcagctttctgcaaaacccggctcgggttgggccggtgtggaaggaaggctagaacaagacagccgtgccgctagggttttgctcagtggaggaggaatgaatcagccagagatggaggtcctcccagaatagtggaccatgttataatagccccaggcgggcagtggattgggtagctggcagcagttagtggggcttcttcagtgtcaagcagccaatgacaaagttctctgctgtctgcagctatgtagtgcaaggctggtggcgcgggaaagtaggagtctggcatttgcagatggctgacactgggatggaacagggggttagactgtgtgtgaccttctcagctgctctagcttcgggtcccttactcctctgcatcctcatctgctggagagaccccaaacctcccgtggtgtggagattgactatgatttacatgcaggtgtgtggtgaaaggtcatcaatgtccttctggttggacctctagacttgacacttcttgggtgtagtgcatttctctgtccctcccgaatctcttttcctggttaagaaaaggacaacccatgtgttgagtgaccacatgggcaaggtgtgtacaggtgtctatgggactcctaccaacgtaagaagcagatcttcttcttcttcttcttcttcttcttcttcttcttcttcttcttcttcttcttcttcttcttcttcttcctcttcctcttcctcttcctcttcctcttcttcttcctcctcctcttcctccttcccnnnnnnnnnnnnnnnnnnnntcttgctgatgtactgcaggtttagatgcatttaaatacttgtcacattgggaataccaaaagggtcgattgatatgatagctttgggttgtagaaacaacaacataagaagcagatgttcttacttgttctcgattgagttcaccggtcattgcaacgctagttgcaggggatggcgggagtttatcagagactgtgcaatgactgtcatctttgcagtggctcaagtaaggaagtttgataaagaatggtgcagagagtggcttttagagctaggttctaatctgccgcatgctgttttcccaccgatgagataagcaaagtcggctgcagattgcagtcatggaggttcgtagagtatgctcctccagctcccctctgcaggctcatctccaggcttcttagaccggctactatgccaggagcttcagggggtgtggccccttgctaatattgtttcctccaaggcgtatattgatttttgaaacaaagaacagttggctgggatccaaagctagtttttttccttctagatctggatgtggaagaaaaataaataccttccatcttccaaaccaagatagccccagagaaggcagatgactgttacagccaagagaagaaattacacagcctgctcagagctgagctcccaagccgcttcttactgctctggggaagtacaccaagtccatgtggccaccactaggaaaagccacccaggttcttctaaagtgactgggtgtaccaaggaaaattaaataaaaacacttctccttagtgtcacggatacagaacagtgtcctggaagttgcggaatgtcacaagctctataaaatgtacagtgacattgtttagaatatgaagccctgcttctcaattttcacttaacaaccagagtcctgagtgcagataagaccctaaaaacgctcctaggcccccacagcaagcagattttcaaagatagattgaccacatttgttctgtgtgcggctgataataagccacagggtggaatcccacagcaggggctggtgacaggcattcacagaggcactgagctcatgttacaattattatggttctatataaagccacggggggtgggggggagtcatttcatgctcttaaaacttactagctaacatttaaggagtttgtgcagagcaggctaagctcaaacattttctcctaaacttaaaattattacagatagccgtaaggaagtgttctgtgtaagacaatgttaaaaataggattttttttttttttggttgcttttcttaatgcctaggattttcatgatgtggtttgtagttcatttccctcgggttatatttaaatagcatcatcctgtgcaagcttaggatgggcttctgtgggtgtgtggtggtacagtgtggcctaaggaggttcccagcacagagagagatgggcagataggaaatcatgggcaaaatctagaggtcacatataatggtaccaaaagcagctcccccccccccccccgcgtgcttcagcccaggacaaactgtatatgtggatgcgatgcgaaccaggagatggtaatgggactaaaaactctcacctaataaggttaaagccagaacacatcaatcactggtttgggatggcactttgtaaacatgtttcatcagccctattaaataaagaatagcatgtatctaaaatgacatcatgataaacagatgtgggcctacattctgtattcactacacttactatcattttagaatgtaatgcctttatatatatatatatatatatatatatatatatgtatgtatatgtataaaagcatgttagtgtgtatatgcaccatacatttatgacatttgatagacagacattcttgttataaacttgatcttgtgttgtcttgtttattctggattaggaggaatgggctgcaccacacagccaaggtacgtagtgggtaggtttatataaatatttcctgtggtgtcgtccgtgtaaggaggaaatcatccaagatgcatctctcagagcacacactgttaccatggaggtgagagcagagagggattgctttgccccaaagacatcctggaaaacacaacagcgctgaagaccccgctacaagacttggatcaagagatactaatggagccgggcgtggtggcgcacgcctttaatcccagcactcgggaggcagagacaggcgggtttctgagttctgagtttgaggccagcctggtctacaaagtgagttccagaacagccagggctatacagagaaaccctgtctcgaaaaaccaaagaaagagagagagagagagactaatgagccaagagaggcacacagagcctgccggtgggtagaggtgccactctggaggtgtgggatatcgataattgactagaattccactgatgaggcacggcaggggttgaaggctgaagggggtgaatggattgcagggtggagccatgcagcgttaaatgcgtttgtttcccttgaaaaactatcatcgagccatttagtaatggattaagtaatggcattgtcagtgcataccctttgctttataggctgattgcacattgagcttggcaggtcattgctactgtatatgtgtaaccttttgtgagtagcgttgaaagattgatttttttttttttttttttgagataggtcaaagatagtcagtatggccttgcactttcatgttgtggagggcaaacttgaacttctcgtccttctgtacctacacctctgtgtgctagattgcaggtgtgggccaccacagctcgtttgtatgtggtgccagggatccaacccagagctcagtgcatgctagacaagcaagcgctctcagcagctgagctatatccccctctgtcccttcagggtagaagttaataatctgcaaggtgttgtcaaggaacttgtgtgttcacaggatcctacagtcagaaatatcttggaatttcagttaatgaatcaatgattatttcatctgtaagcatctaaggtggaattatgctgcttatttctctacgattgccaatgtatgtacttccgtaacttccattttactttgtagccaggggattgtcaaatacactgtgcctggttcacagccccacacattataaattttgcccaatacgtgggcatctgcttgttcccttcatatgatgacagctgtcggcgtagcaaactgagcttaatgtatttatataaaatataattcggggagagttttcttatagcatagttgaaggttactaattgaatcttccgtaggatgccagtgtttcctggcttcctggcacgcttcgaatgccatgtggctctcttttcctctgtctttcaataaggctccgctcatttacttatgtacataatgggagactgcaagagcatatgctacccagagaggaggtttcccagcttatcaaatcccctttgtttcttaaactaacaaaaggaagttcctgtgagtttccacttagccactgttattaaggtgaggtaacaaggcagtcagtcaagctggggtcaggctgagcaccaggcaagcaccccagctgcaaaccccttctaccttctacccagagcaaacaaagccatcacctgaggcagcctggtttgttagcttaaaagtctgcagaaaatgggagaaaactcctgcaggctcactgatggtatggaaatgaggctgtttagggtgtagaacaggagccctatctaatcgctcacaagcccgctggatagaaatagcgtaagcactcagagtcatggtaaccatggaggaactgcgaaaagtattatggtttagtctgtttacgaacacagcgcacttacagtacatgttataagtattggtgcacaagctggttttttttttttaaaaaaagaactaaaaataagccttagtacataaaaaggaaatatccaattatctaaaaagcgtcactgttccctgacagcacaacttacccgaagctctgttgcaacactttctgtctcctttattcaaggaaataatttccaatacaatttaaagaaaatgaccacaatggcccgtgatgagttactattatctgccccgctttcggataaggaaatggtaaataatttctccaaggttacataatttcagacaatccgatatttatcaatgaccaaggtttttttctcgtgcaatccaatggtagaagactttcctctctgggatttcagagatgttactgctatgtgtcagcgttctaggggttatgcataattcatctgcacgccgtatgccttcagcttcgcaaaagaacatttccatctttgtattaccttgtcttttaaatcccagccatcttgctgtacacgtctcagtgcaggctaccagcattttcatctgtttctgggtaaccagagctacaacgtaggaaaatctaatgagggaaaaagggctaagccaactaagctgctgtctccgtcaactcactttctcttgctggctatatttactttttctcccccaaggaaagatgtcaatcaactttataagcacaggtccaaagagaggagagcatcttaaaactccagtcattatagaatctgttcacagtagggtgtgtctcaaaggaaaaaaatattccaccaatgctggtagaatatggagaaactaatatctaatgtggttagaaaataatttatattcaccttttacctggtgctggggagaatcacaaagtactaattttgctctgatttatccgtgtgtagccatctcttggattagtgtcaatatggtgtccctcaacctttgactcagcacatccatgtgcttacatttaaaacgggctttcctgtggcatcaaggagtttgagcctttccttttatctgctgtgacatctttgccaatttcactggagatcttataccatttatacctaatgggattgttactaatttacatgcagttggattcataaatactgcttactgccatacgtatatccacacccagtttttttttttctctgcctactttgaggataattaaatatctttaattactctattttatcttcgtgattggtttaatagctacattgctttcacgggttacctataacaaattatctcagtatgttttaaaacaacagatacttacttatagacattaaaaattaaggtgtcagcagagtcgggctccagataaaggacttgccatgcattttcttagtctctgttcattatcagaagtccttggagtctcttggtttatagctataacaccccattttctgcctctgtcctagtgaccctctcccgtgtgtgtgtgtgtgtgtgtgtgtgtgtgtgtgtgtgtgtggtctgcagatccactttcccttttaaaaaattgcaatctctgggttgagggaccaccaagtactttaactttaaagtgtgtaactttagctgatctgtaaggactctattttcaaataaagtcacattcagttagacctgtaatgagaagaggatttttggagaacactctttagccatatatacaagtactcacacacaaaaaaacacacacacacacatatgtatacattcatatacacattcatacatacgcacacacacatatattcatgactactctaaagtttatagtataaacctctaaccaatcccagtttactatcagtaaccttctgctaccacatcctctatagtgtcagatctcaaccagtgtacatttcccctcatacctggccaagcacggagtactatatgttaagcttccagagtatctcccacatctgtttcctcttctgaattgctactgatatcaaggtaagtccccattggttcttgccttctgttcccaagagcctaagtttgatcagtttcctgagacatcaggggctactgtcattttctcctaggttccatgtcatgtataactgtattccttgcctacaggagtcttgaaggttttcctgcttgttttatcattatttcccttttgagacccaactgaatccagcctttcttccatctccagtagagtgttctgtagcctcttgcccaagccccagccccacccccacccccttccttttcattggctaatctgtgtgtcatttccctccctgggggatataggggcctttgaagaggcatctcaattgtctgtgaacatagccctgttcattcagtttttactgcatgaagctattggtgacatgagaggtgtctgcaccagcccttactattcactaagaatcacatacagctggctaagtggtcccttagtaggtgcggtgataaattctgtctagcctgcagaagtcctttcagtattaacttttaagttaagcactttacaagtccgaatagtttgggccatttcaaatagtaaatgtggatgtggttcattctccatgtgtttccacacaaatattagaaataaggaagcattaatgccaaaagatggactggacaacaatccattgtgaccaaaaaatctgtttattgtattttgttctgctacattaaagcacttcaaacaaggaaaggtggaagaccttgtgtggacaatcttgactaaaaacactagcctgctatagacattttgtgtcttgttagaacttggataacacctcgctacaattctcttttcttgggatgtctcacaatgtcattctttacacatggctttttttttttttttttgactagagaaatcaaaccaaatccagctataatggtggatctacagagcaagggaacattttgctcatatccatatagtggaagaatattctaaagtaaaaacagtaattccttacatttctcactgtcaatggaaacaaaattgaaacaatgtgttgagatggagcagggattctgtggagcctccagggtctgtggtgcaaagatgcacctgcttggcacctgcttcccttggcagcaatgtggggtgcctcattcttccctccagggagccctgtgcaaagactgtggggcctaccactagcaaagtgttgtaacaagggagttccatcaagctgcacactctccaccaaactcaagataagtgcaccatataaacactttgcaactttgtcttcacaagagctcatccagaaaggcactgctgtctgctggaggatagcccctccctaattttacacatgtcattatctctggaagctgtaaatgttgccttatttgtaaaaggagtctgtagagatcatcacattacagattttgaaataagcagggcatcccaagtcatccagctgggtcctgcagaccatcacaaatgccatactccaaaaagagcagatacagaagagcaagaggccaggactagtagtccagccaccagggctggaagcgggctctccacatagcttctggtgggagcaccgttctcccactggtgtatgcttttagcatagtggggcgtgctgatttgggtcttgggcctcctgaacagtaagagaataaatgtctgttgtccaagtcatgaagtctgtgcagtggagacacagatgtgtgagattactcttacatttacaggaggaggaaccgagtcttggagacatgattcacctactcacagttgtcaactttaggataaatggagctgacactttgggtcaatcttttaccctatgtgtgggaaatcatcttctgcctagtagggaaatactaacttgtttccatggctggtaacagctggatgggagtcagccagggtctcaaacagtctagcattttgcttctatctgccttggagtcatgaaaatcacaggaggtccaggttcctctcaaaagattgacatctcagctagagaaggctgatgcttctccaggccacaggatgtagttggcaatgggggtgactgttctggttgctcacttttgatctgcaccatgaagggagttggatcacatagcccagagattgatagccagcaattctgagggttccacttggacctcttctgatggtgactgcagcatagtatttgcagtgtatggcaaaaatataagccactagctggtgtgtgtgtgtgtgtgtgtgtgtgtgtgtgtgtgtgtgtagacatgaatacannnnnnnnnnnnnnnnnnnnnnnnnnnnnnnnnnnnnnnnnnnnnnnnnnnnnnnnnnnnnnnnnnnnnnnnnnnnnnnnnnnnnnnnnnnnnnnnnnnnnnnnnnnnnnnnnnnnnnnnnnnnnnnnnnnnnnnnnnnnnnnnnnnnnnnnnnnnnnnnnnnnnnnnnnnnnnnnnnnnnnnnnnnnnnnnnnnnnnnnnnnnnnnnnnnnnnnnnnnnnnnnnnnnnnnnnnnnnnnnnnnnnnnnnnnnnnnnnnnnnnnnnnnaaaatgctgatttgcccccccgtgttgctgttcatattcagttcttctcacttgggataggtgggtggggtgctttcttaccaaggagagtatagataaaattttttttgaacctaaacaaaaagaagaggagattatgaaatccagagtcataatctgttttatgaagtagaagccacttctacccttctccacttggaaagtacctctgaagctccctttatgtctctgattataagacctctgtgtgctaaagaatcctggggccactttgttccacgcatttctcagtgtctcacagacccacagacgtgcctttctgataggctcggagtgctgctcatgtttttctttttttaaacagtcacagccaagatgggaacggggctcccaggactaagacgctcagtggtatttgacgttcatctgactcgggtccaacattccccaacaggggctttctttaaaatgtccctgattataggcccttggagacagctgcagtaccaattgttcagcgtttggactttccattgcagtcaagcgaaggtcagaacagcgaaaacacaagagagttcttcagtgtgcgcagaggagcagcactacctttgttatggtcccttgccatccccacctcaagtacagatgtaggtacatagggacatgacacacccacgcacctacaaggaccttgcactttctccaccggcagattgcttataaccaagaaaatgtttgtgcatcctcctctatggtcagtgtggttgaatgctcacagattatgtgtacacacacacacacatacacacaaacactgtctctctgtctctgtctgtctgtctgtctgtctctctctctctcaatctatctctctccctcaaaaagcaaaccaaaaaagaacaacttagtttactggaaactactccacccagggatgaaaagtcttttgagttttaaaaaaattatttctggcacatgtgctatgagctaccatggttgacaagcagtttccatggtgattttgactgtaccgaagagcttcccatccagatgctgtgtgattttaaaaaaaaaaaaaaaaaaaaaaaaagggtgtagaacccaaagagtcagaaagaattctgtctgtcacaccttggagatgaatgctactatgattttgttgttgtatttgatcctgacactaagtacagagccttgggatttattttgccaaatgaacctttgctgaccagtatttcctaagaaaggtgttctgtggtagaggtggcacccagccagctgggccgtgactggtgaggcagtcagggagccccgccccccagtgcccatgaccctggttccagcgttacccgcttgagagagagccataggtattacgtttgtttagtacctggcgctttccactttgggcacagtcagatgcttcaccgaagggcacttgaaaaattcaagcttttgctgttatcaccagaaagcatctatgaaaatatgcacttgtactcagagccttgagttttatgcagatgagttaacctcccctccagggctcagagaataatctctctttttcttttgtcttttccctttctggtcaagacaatagtcttcatgagcactaggtggcaaaaatctctccgattcccgttttagttcatacgatattaaaaaagattattcaaagatttgaatcccggagcaaaagaaaaggaagcacgtaacagagaggggagagagcttggaaaccgcaagccagtgtgcggacctttgaagggcatttgggtgcaagagagcaagcgacgtcgtgcttctcagtggaaactcacgggggaccaggtcaaagaagaagggatccaatttgtagctgggcttgaaggctcaggcctgtgatcccagctcagggactcaggcttataaaatcaaggccacgtggattacatagtaagtttaaggctagtctagtataatttagttagctcccatatatnnnnnnnnnnnnnnnnnnnnnnnnnnnnnnnnnnnnnnnnnnnnnnnnnnnnnnnnnnnnnnnnnnnnnnnnnnnnnnnnnnnnaataaataattaaaaaaaaaaaacaaaaaacaaaaaacaaaaaaacccaggcaagctagtttgggccagtgtagaaacaaatgtgccagcactgcagagcaattgacttgattcttaaaatctccttgaactgggggatttcgtgacgctctgattcccctggaggcaaagactggagacccatagtggccttcttgtcctgtcttcagtaggtgggacctttcagctctatctaacttgataactttcatggttatttttcacttaaaggactgaaaattgtctacagcgtctgattttttttttaaaaggaatttggggaaggacataatgaattattcagagacgtcaagttgcatcaagacagacatcttgatacaaattacgattctaaaattgttagtaatctgttttattcatgcactctacttacaatagaaggcttgctgctgacagttcttagatcactcatgatcccacatcccacggtgctctttgaatgggtgctaaatctggtggggggctgggcggggtgacatctaatggatgctgtgaatcttaactttcctgggaaaaggttactcattaggacttacaaatgatgtattcaatatctccattgatgcaattgctttctcttggaacaggtaccaaaatacagtttgtgttctatatggggtggagtcttttcagaacaattttagcacaaatacttcctttggggttttagtataactccttcttttgtagttgaagctgtagacagtttgttcagaagatataatggctcttctgccgatcctttgaaaacacacaaatctttttctggtttcattttgattttctttttaatgagtgtgagttcccccttgacagtttttctgcaggcctgagagaaagcgtcaaccagagagggtgcttggactcaggtgtagtagaggtaccactagatagagcatcagatcacatcccatcacctgcctgccactcagggccaggatatcattcctgagcagtccagatgctactggtacctggggtgcctcatgatgcatctgctgcctctaaataaaacccatatttaggaacatcagaactcttgccaatatgacaacagctgcatattcaggaatccttacagaacatgatagaaccccaaactgatagatctgggaacaaggctaatggttcatccatgcaccaggtatatacagacaactatataaagagcactctgaaggcaccaggacactagtggtctttccgtcctgggaggttgctctagttgaagaaactgatagtgaacacgtacccaaatgacggcttttgtttttcccagacagggtcttatgtatccaatgttgtcttcaaacttgctgtgtagccaagtattaccttgaatttctgatcctcctgtgtctacctctaaagtgctgggattatactctcaggggacagtgccactaaacccagttttatacagtgctggggatcaaactcagagctccacgtgctaggtattagttgagttatagccacagcccaacacaaacatttttatctaaagtaattctggatgtgaggtaggaaaaataacaacaaaacaagcaaattcccaggtagatagggagaaaagaggggcctctcttcttttagatcttgagggatgactttgctaggatggaaattttaccccgagactcttcaggatatgtatagactcagtctagacagaaacagagagtaatgcagagaaaaggactatcgtgggcaaagagagcaaggtgcaggctgagacaggtgagctgggcagcagagagtggtgagtgggtttgatgagtgctgagcgatttattcagactgaatggtagaggggagccagttgtcagaagaggggacaaagtacccagtgggcatgagggtctgagactagccgttgccacgtgctatcgcttgagtcacggatgacagaggccacactgagtgtaaaacatgaagcatggcagaacagaaaggtctgtgggaaggagcagcctcatgtcctgagtagtcacctcagcttctgggtggctcagcacagcaacccttgggatgaacctgctctgtaattagtgtctgaggctgatgtagtgaaggctgggcatataggtccactcggggcacagtgcagcagggattgtgagaagagaaagccccaagaactctgagcgggagtctctccatgacagtgccctatatttggcatttaaacaggtgtagtgcctgtcctccaggcttgggggccgcattccagttgattcacattcttgtatctgtctcagcttctgccatgggacatgggagatctgagtagaggaatctgtgactcagagatggtcagagagaggctgagccatagaagccctctagcatcttatcttggaacaacaacaacaacaacaacaacagactcagagagttacaggctcatacaaagacacatagcatgcctgaacagctgggcttgggagaagcctgccacgtttacagagagttttgagtgatactttcataggtcttcattaaatcctgtagggtccaagttttaaaaatcctttcagaatcaatgtatttaaggattaagcccatcaaaaccccaggactatttcaagtaaacagcttacaagtggaatctcaatgtcgcccagataatttcctttgtatgtgcactgtggtaattgggctcctgtctctccagtgaaaagccaaacagtttcagatctaatgagtcctggccactagggcagatagatttcggaattctctatttatagcatcttccagtgtcacttgcaccttttctttaatcagcactgagctgtcatgcagcccacaggagccttgagcatacagatgagcaagctggggtgtctgtgccaacaattcggggtgcaggttggagctgaaggcttagtgtgggatgttggcttctctgcagaaacaatgctttctccagaccaacattggatcaagccttagaaattgttgagtgcacttggcagaattgaatgatctctctctctctctctctctctctctctcttgtcccctcccttccctnnnnnnnnnnnnnnnnnnnngattggtgagagatttatactataaactttagagtagtcatgaatatatgtgtgtgtgtgtatgtgtgtatgtatgaatgtgtatatgaatgtatacatatgtgtatgtgtgtttgtatgtgtgaatacttgtgtatatggataaagagtgttctccaaaaatcctcttgtcattacaggtcctccctccctccctccctccctccttccctctcttgacctgcagaagttttgacattctgtgtgccagggagagttaaaatgatccagacagggctgcaaaaaccccgtccaggaggatttcgctgagctcagagatcaggaaaacaagcaaggaagaatgtggtttaaaatggaaaataggaattaaaacagaggccaatcctgacggatcctaaagcctagtccacttaggaaagcaagagtgtttttcaagcctgccaccagcgtgttagtgagaaggggtaggttacatgtgagctttgctgagttgggaggcagagcagtcagacaggaaaggctctggaccaggactctgtggtcttgagttggctgcaagccactgagtctcccagagcctcaattgccttacctgttagctgggaacaatagcagtctgtctctgagtgctgatgtgatgagtggatcaaaggagatgaggcacgaagacagaagtttgtaagccaggcacttcattcagagatgtgtttcttcccaaatttgaaggccactctacacattcagataacctggagtcttagagatgttaccagcctctcctaggacatttttcattcattattctgaattttgcaaagcccttgcttgtcatttagctgggcaagccctgctgcagtctcagtcctcaccagtggggggtgccgacctgaatggagtagagatcaccaggtggcccaggtcagttgccttgattaggtctgtgtgtcctccctctctgcttacttctctccccctccccaggtttttcctggaatttttccttttaatgtcaactcagctgcagcctgctggggtttggtgaacaaatgactgtctgagattcagaggaactattgttcacaaaacataccattttgcatgattttttaattctgttacattaaactgacacgatcaatctggtggggagggagcagggtagatgctcagggaagagcatcttcatgttcatcttaattcagtcaagattagtgagagaccgtgtggttaggaactgaacaggaattgaagtacagaactcagcagacacacagggtatcttaatgcatgtagactgtcatcctctgtgtcctagtgtggaactgacagggtgggggttcagcactgctttaagtcaacaggcagagtcacttttgacccttaaagctgggttagcccacttctgatgtgtgtgtgtgtgtgtgtgtgtgtatgtgtgtgtgtgtatatgtgtgtgtgtatgtgtgtgctatgtgtgtgtctgttgcatgtctgtgtatatgtgtgtgccatgtgtgtgtctgttgcatgtctgtgtgtctgtatgtgtatgtgtgtnnnnnnnnnnnnnnnnnnnntatgtgtatgtgtgtgttgtgtgtgtcctgtgtgtgtctgtgtgtgtcctgtgtgtatgtgtgtgtatgtgtgtgtgtcctgtgtgtcctgtatgtgtatgtgtgtgttgtgtgtgtctgtgtatatgtgtgtgtatgtgtgtgtgtctgtgtgtatgtgtgtgtctgtgtatctgtgtatcctgtgtgtgttgtgtgtgtttgagacagagacttactctggattcaaactgccttagtcttccagtgctgaccattcaggaatatgccaccatgcctggctagccccacatttcaatggtgtcgcctaaaatgactgtcccctagtctaagcagaatgtctttgccttgtgattttgagtgtgtcattcatactaaggggcagtgcctcttaaaaggaagatgcaggagtatgggggctttccagggttacggaaagccctgagcttaaactccagcacaaaaggagaaagaggaggagaaaaagaatgtgaaattccacctccaagtctgaaagaggggaaaggagaaacccaagagatactctgctgacagcagacaaaaggtaggagcaagccaggtggccacagacaagtaaatggacaaacaaaatgaggtctgctcatgcagagaagtctcacccagacattaattctggcacatggatcaagaaagttgactcagtggattagagtgtttgcagctgcacccacataaaaacactgtcatgcgcacttaagtatctgtaaacacagtgatgtgcagaagtaggggaaaccagaaacaggagccaagcttcaggttcaacaagaggccctagctcgaagaaatatgcagagagtgatggagccaaatacctgacatccttctctgtctgtcctcatataggcatgcatgtatgagcacctgcacatacgtgtgtacacacatataccataggcacatgctccctaacacaaaaatctaacgatggcacaagatgagtggtccttgagggcaaatgctagatggaaaaccaagtcacaaaaggacacctgctgtgtggctttcatcatggtacacttaagagtagttaggagtagttgctagggccctggaggattgagaaataaattagtgtttcaatggtacaacatttcagtttggggcaatgaaaggatacagagatggatggtggtgatgtttatagagcaatgtgaacatgcccggggcccagagctgtgcacttgaaaacaattaaaataccaagtttcctgtatgctttacaggaataaaacaagttctaagtaaaatgagacactaggtacctgtaggtcttccttgccctactactgcctacaaacactggtgacccctgtcttcagtactttggccaagatggcagccagtgcttcttccttcctctgtggaggtaggaagagtagcaattaccaaggtctatcctggacagcctggagaaggcctggactgaagcttcaagtgtggcaggaaccagttggaagaacactaagtggcctctccaccctttcccagtcagtacctgtgtcttcctaggttccatgtctcctgtgccatctgtcataacagctggtgttccccagtgccagtatatatgatgtgaatggttatacaccatgccctatgagaaaggctttataaagtggaacaacacttaagaattctttggtccccacagaagagagaaccacannnnnnnnnnnnnnnnnnnnaaataaattagtgtttcaatggtacagcatttcagtttggggcaatgaaaggatacagagatggatggtggtgatgtttatagagcaatgtgaacatgcccggggcccagagctgtgcacttgaaaacaattaaaataccaagtttcctgtatgctttacaggaataaaacaagttctaagtgaaatgagacactaggtacctgtaggtcttccttgccctactactgcctacaaacactggtgacccctgtcttcagtactttggccaagatggcagccagtgcttcttccttcctctgtggaggtaggaagagtagcaattaccaaggtctatcctggacagcctggagaaggcctggactgaagcttcaagtgtggcaggaaccagttggaagaacactaagtggcctctccaccctttcccagtcagtacctgtgtcttcctaggttccatgactcctgtgccatctgtcataacagctggtgttccccagtgccagtatatatgatgtgaatggttatacaccatgccctatgagaaaggctttataaagtggaacaacacttaagaattctttggtccccacagaagagagaaccacactgaggatgaagaagacagttgtccaaggctgtcagaccagaccaaacagggcacctcctatctgggaatcagtgactggcacatggtcagaccagacagggcacctcctatctgggaatcagtgactggacatggtcatcttaaacatatgttctccatgggcagagtaagcagctaagagttagattagtaaatttgcatgtaaaaataagctatggttttaactgttaactgtattatgtattagtaaatttgcatgtaaaaataagctatggttttaactgttaactgtattatgtatctctgtgcgtgcgtgtgtgtgtgtgtgtgtgtgtgtgtgtgtgtgtgtgtgtgtacatgtgtgcaggtgtctagagagtttagaagtgggcattggatgccccaaagctagagttacaggtagttttgagccacctgatatgggccctgggaaccaaacccaggtcctctgaaagaacagcaaatattcttaaccactaagccatctacctcttcagcccccaagtttgtgattttaaaatcagactagaatagtggcccttctctatgaagtctggaagcacccatgattatagcaaccagtccatccaatgaaaaattttaaacaattattctttagaggtgttgatttggggtcacaggaaaacgtattcatatgcctgtcttacacccccatacttgaaccatctaccctgttatgaacaccttgcattacttaatgtggaacatttgttacagcttagcaatgatcagtaaacagctctagctaatgttcacacccatcactgtgcatgcagtgggttgtgaaacagatgtgaagacatggagccatcttacacatcactataggttgttgctgctgctctggagaacccagttcacgttttcaacatttcctctgtccaagctgtgatcccttcacgaccgggctcatttcaccgattccagaatgtcttacggtggaatgtcaaaatgtgtgtagacttttcaggttgcctgctctcatggaggagtgtgcagttagggttctcccatctctccatctcccatcacttgtttgtctcatgaataatagtctagtccttcaccttggttgtttccaggctcggttagctttaagatttccattttcagggttggaaagacagcacagcagttaagagcacatgttgctcttgcagactatgtgagtccagttctcagggaattcagttcttcatacctgtcaggtggatcataactccctgtaactccaggtcaaggggatcccacactcttctggcctcctcatatctacaaagccattctctctctctctctccctctctctctctctctctctctctctctctctctctctctctctctctcacacacacacacacacacacacacacacacacacacacagtgtgacttggagaccaccctggtctacatagcaccttccgggccagccatggctatccagtgaaactcttatctcaaaataaacaaagagtaaccaactcttgggctatattatctgttacagaagtcatgggccccatgaggctactgagcagtatgtaggtgcctgttccaaatgcagatgttcaaactaactgtgaaatgcacatattggatatttcccagtgtatgttcatcgaaaaagttcccagaaatgaaagagcatgaaatactgtttattacacatcacattgattatgtatggaagggattggattttagatttacgagatgaaataaaacatggtgttaaaatgagttatgttgatttcttttacttttaaaaatgaggctactaggaaaagtaaaattatctgtgcggtctccagtattgttctccagggcagggctaccatagaacaaaaggaaatgtccctttaactatgggcacatcgatttatcgggcacctgctgtatatgagcactgcttaggcagcagagacaagtcactgactgaaagagccatggtcttgtgggatttagtacttgataggtttgaaaacattgggtttgttttttcatgaatcctgcactcctttaagaagagtggtattcccatacagaggaaagaggctgaggaggtgaccccagcatttctcagatatgcagcttcagacacattcttaaccttttatctttagtgtcctacttgtagactggggataaataatccccttctcatgatgtttgttgctcatacacttggaacagaggaagcagtccgtgtagattccataaaatcgctcagcagttttagagtcctgtctccaagccacatctccaaagccaagggcactgttgcagttatctgcggatgcaaggctctgggcatgggggacttggtctggggttcactctgccttgtaagttctcatttctaagtctttacctttgcctgtctcttgccagcaatgcccccgagacacgctttctggcacacccacctcgcctcttgctgagttctagttgactccagtgcaagtcttaagccaaaatatcaatggtcgcttctcagttttaacgtggggggtcccgtctagagagcccctgctatagctgagaactggaaatacccatgggtagctcctccttcaagctccgaggtctctctctgcatggggctgatacttctgtgggtctctaatgactgcacatgttaaacagtagagaggatgcactgagatcatgctgataaaacacactaactagttagagctcttgggatctccaattccacgttctctgctcccctcctttggtacaaggcacagcagaacatagacactccaggaacctgtttgctgtctcctgctcagccttgctgatcgcccactcttctatccaccaagcctatgcatttttaatgttttctgaaactgccctggaaactagaccttgagtagcacagcccccaccctgaagcggcttactgatcacactagtgagcgataagatactggagctggaagaagagccctcagctaagtcacctgacctgccactgttggctgatgctgaagatgcttgcatctgtgcagctgagggtaaaagagcaaacaggtgggacagggtgtcctggtccttggatgccttggcttctggaccacttctgactaccctggtagcatgcagccttacatccacccctccatttacatttactggcagactggatcccttcctcacagagtggtctcgtcccagttaagggatagatgggcccagcctccctcactttactctctactgaggttgttttggtgcagaggcaagaaaggggtagataccactagccttgggaatatttatatgtgtgtagtagaaggacacagagaatataatttctatttagatcagcatgccatgacttagtgaaaaaaatcacttggaaggaaggtctgtgaaaaagaaagatgttatttgtagaaatgatcttccttttgggtaatgagacctttttgcctcctgaatgctatatttgatggaccctgattagtggaggggtgtgtctgcctgtctgtctgtctgtctgtctgtgaatgtgtgtatgggagtcagaggtcaatgttgggtgtcttctatctgttatcactctctacctcctatttcaagacagcgtctctcactgaacctggagttcactggttagctagcctggctggcaggtgagccccagcaagcccacttttgcatctccagaactgggacgacaggcactcaagaccacaacagactctttatctcacataggtgctggggatcaaacttgtgaatgttggttctcatacttgcaaggcaaacaccttaccaactgagccatcaccctagcatgaggatttttttctaaaggaaaaggtgacttagataaataaaactgtgccctaccaatgtgaaatttcatgcatcagacgagcatccttttttaatcacctgatcatcagaattaatcttgtgacacccttgttcagcactggggcaccaccatgtcacagcgattccaaggactcaaagtccatcagccaggagcctcttgaagctttccaggaacactgaaagggtatgtttgggggagggaggtgattaataatttagaaagaaaaatgtttatcacatagacaactgaaagctcggtggaaatattagaaaatacaacggccagatagtgtttaaaccgttcccactgcaagcgagtatgtgctctagacttcatgtgcaaaaggtgggaaagccaaccattttcctgtgagaggtgagtaccaagggagaggaaggctgggcttagcatggccactgattttgcttagtctaagtccctactggaataccaagtgaccaagtcctgtaaatattgaaacacagtactgaggtgactaaagaggacaaggtgggcaggagcttgttcagtgttagtcaaccactgtattccagagtgtgactgtgtcgagtccctcctggttctttgggatgactgagactgacccctgctggtggaaaacgactaaagtgtagatgttaatgatagtggactccagacttgccaaagagcctgcctcgccgtatgtgggtctgtccctccatctgtgcctataacccctgatggtgttgccacggtctgcagagggaagaggaacagacctggcatctctcagtccttagtctcagtctttaccatcactgctttatcaggactccactgctctgcatctcctccccactctttgcttaaggttttgtggaaggaaaagaagagacccttcacaccattacagaggctgggatcccaggcccacctctgggttagactctggataaatctgaggtctgggtcatttgtgtttggtgaaatgtggatggagtattcatttgggaggtatttgaacattcatgtcttagggatgtggaaacccagaagtctgggttgatgcctgcaaactgataggaccatgttctcgggagccaatagatgggggagtgaaaagagatgacgtatggtgtcagtgtgtttcccatgaaggaaaacaggtcttaaaacaaacagcattaaacgtagtgcaaagaaatgcacactggactgtgatttatcagtagagccagcattcgagtcagagagttgccttcccccccacaggctgttgagcagctttttttggagctgatgtgggtgctggaaggaaggagactgtggcatgagaagctaagtcaggggactcagcattccctcagaagtatttgctgtccatcaggacctgaaggccaaccctgcaagatctgatgacgtttaactcccttagccagtccatgttggtcctgacagctctggaatggctgctgtagaattaatgaagttgggatgtttctaaaatgaaattttaaaattgggcttcaggaagagcatgagcagtgcctggtactgtaaaatgacattacaatcatttcattttgagatgatttgacagccatttcctcagtctgatgtctgtaacttaccagtcaggggaagagaataattctgtgtgtcttgatgaagtgatgaaattgagaacaaagccttttgtctctagactcacgtttccatgttcaggctcaagtggtgtcaaggtatttaggagactaggaggttggaaacctgaggtctttggcatggttttcctgggcctgtttaagtccttctatttcatggcaaagctgtgccttcaattacagagcagaggtaaacaaggaaagaccagcggactatctccaccaaaatcctcaaccccaattaaaaccatatacaaaaactaactccaggtagatagtgaacctaactgtcgtaaaataatgaatgtctgggaaatgtcagagggtggtgtatgtctatggaattggaatggcttaaatacagcacaacataggactgatgataaaggaaaaaattaacattttcgatttcaatatagtttaaggtgtatgttaactaaaacattaagagagtcacaagtagactgtgaatgggaattggccacatctatggcagtgaaaggcttgtatctagaacgaaaggcaacatctacagctcattagataatccggaaaggcatgagtagccagggcaggagagactgctcagcagttaaagcacttaccgctgttatagaagatccaagttcagctctgtgatggtttgcatatgctcggcccagggagtggctctactagaaggtgtggccctgttggagtaggtgtgtcactgcgggtgtgggatttaagaccctcatcctagctgcctggaagtcagttttctactagcagccttcagatgaagatgtagaacccgtagctcttcctgcaccacgcctgcctgggtgctgccatgctcctgcctagataataatggactgaatctctgaacctgtaagccagccccgattaaatgccctttaagagttgccttggtcatggtgtctgttcgcagcagtaaagccctaactaaggccagctccaagcatccatgtctagcagttcacagctgtgtataactccagctccaggggcatctgacactgtctctggccttctcagggacctacatttacacgctcacacacacttaagagtattttttaaatgtacagtacatttgcactcaacataggaggatctgtttaggaaagtgctcagcctcagtcatcaggagaagctgagtgaaacccgggataatggaagataatgaacagccatcgcaacactatagggtaggcagggacatgctggtggggtgcagatggctataaccaccccagagaacaaccgagcttgaactaaagctgaatacaccctaggacactctggttttatgcctatgcatgcattcatacaccaaaagccataaacaagacatccaccacagtgttcttcataagtggaagcagtccagatttttgccacaatcagtacagatttcttgagtggccctgccatgaagtccactcagcactgagtgaggagcctgtaacctgcacttggtctctcagagacggcgctgaagagaagaacccaggcaaaagctgcatggcatgtaccgttccatccgtataaagcacacaaggaagcggaggcacctgtgtcacgtgagatgcgcacaccttctcaaggaggttctgtggaggaggcaaagggggatcctgggctcctgcccaaatctgagcgtgttgggaaacacggctgaggtcgtgcagtgagaatgtttcagtcttcactgtgactctgtgcacaggaagcagagaggtcatgtaccaaacgaagggcaccagttcatttcagaatgtcttccagtcccaggctactgtgcagtgtgtgtggggtgccatgaagtgttagtgagaagcagagagatgctgagcagtagatggaaagactgagaatgctcaccacttgtctgtgctatggaatgctgttagctctcccagggggcggggggactccctgctgctccttaccagcgctggcagttttcctattaaaattatatgtaacgcctcgatgttactactgttgctgttactgtattcatctggagctgcagatttagatagctgtaaatgtctcaacccgaactgtaggaattaaatttccattagtggatcctcagcataatccgatgaggtatagtctgagcatgaactcaagagccctgggttccaggttcacctcccagtcctgacctgaagcaagctatttgaccatatttctgcagtgtcttacccacctaaaacataggagcagtgcagctatggagaccacacccccatctttaagactgctggagacataaaccaagatcatacctgcgaacatgcttatggagcaatagatctattatgcaaaccccaccttccaatgagtgccagcaatgtttgcatgggcttcctaagttgtttcctcctcctcctcctccttctcctcctcttcctcctcctcttcctcctcctctctttctcctcctcttcctcctcttcttctttctcttcctcctcctcctcctcctcctcttcctcctcttcttctttctcttcctcctcctccttcttcttcctcttctttttctccttctcctcctctttctcctcctcctcctggatgcactgagttttctagatcctaatccctgttctctggggaattgcatgcacttatgtttgcaggttcaaataagcacctgatctcactgaatacacaggagctagctcaggagataataagtgcagctctttattcacacttcaactgtccatacagatatgtttagatttaacgattcacctgttcacacgcgtaactggccaggtctggaatatgtctgctagggctaaatcacttcaactccagccatcactaatgtctcgaagactgtccgtgatggaatttggaaccttttagccaaattaattggtcagaagaaatctatctaacagagggagagggggggaaatccatgttttaatcaacttcaatttaattgaacaaccttccaaatgaattctttagacattgtttttctcagaaaatagactatcaatctaagccacaggttccaaaactttcacttagcagcagacgtatatttttgcaaatgaaaccttccactgaacataaacgtatacagcagctctgaggagggccagttgcacagttttgaagtagagatgagagttgtggagtctccaactcaagggtcgagtatcttacaactggaaacgtaaaggggtggagtcactattagcccattttggggacattctgtgtaggtactgtgccctgtcctattctgttctcaacctcactctgcacacctggtgtgctgtgggtccaatgacctgtcagagatggggtggatcatttgtctgtggcttcaatatccccagggccccaagattctgaaactgatggtcagtccatcttacgctttcctgagcgaatactgtgttttgaaaggctgtgaaaaatgatatcaataactgcaaaaaaaaaaatacccagagtgagccagctttctcaaaatatttcagttatagattccagctagctacctttaagcccttacccatggaaaacttcctgaaacttttttttactcaaatattctaaaatgttatgaaatattcttgcttgctttctctcctcctcctccctctccccctccccctcctcctcctcctcttcctcctcttccccttttcctcctcctccttcttcctttcctcctccctctcctccatgatagaaaatatgagatcatcgtcttaccctctcccagtaaatttcaatgaaaaatgaagaagcaagcaataggagactagagcagaccttgctggcaggcctcagcagcctattccacctttgcctttctgaaagcacttacatagctgctggccccagagctggtgagagtacacacaggcttctgccactgacatagctgcgttctttctgcagaggaagccttttaaggttatcgttttaggacctctagagaaactctttgttcgtgggtcaagccaataagataactctgaaaaggaagaaagtgtagctaaacaaaccaaagcagattgctctcgggaccaggtttgttggtcattggcccacaggaggccctgccatccacagccaaacgcatgctttggaaacatccaccattctaccttgagaacaaagacagaatggcaaagggggagggtccctgaataatttgacctcgtatgctgtggttgtactacaagcaacaaagacatacagggctgcttggaaacctcttgagtttgaaagacaccccaaggccagagcccaacctcattaatttcttttaggataaaaacagaaaagcaagatttatagccatcccagccccaaaccctacatgagttggaaatatacttactaaaaaaaaataatgaatatacttcctgactgtggcttgcaaaatgtaacaaacatgatatttttcctagatttgatgtttccctattgtttatagggaactaactcttgttacccacgcattacttccaaggtaatacttatccacttgccagaatataccctaagctcacaaaaatattccatcttttcaaaagatgaaatacgacttgtaaataaacttctagaaaaaaaaatggcttcagaggtaataaagaaaccagagtgaaacaagatcctagttattaaatcgtggaatctcagcacgcaggcctggtaaggaagctgaaaatgccaatcttagtctcccttttcgtcttacttttgctgtgggacttttggaaacaaatttggttacatgtatcaatcggtcttactgtttgcaactttcacctaggggcttcacttctgtttgtatttgcctaaagaaatagtctgcttttaagagctgctagttttgaaacgttcctgtcagggaagcggtgtgttagccagtttctcgttgctttgatgaaataccagaggaagcgatttaagtacggaaggtttattctggcccactgttttagggtgtgtggctctgttgtttctggctttggtgaggtaagggcatacggccaaggagatcactgaccccatagtagccaagaagcagagaagaatgacagtcaggagccatggctagtaaatacccttcaacgtcacagccccacccaccccctcctccaaccctgggtaaccctccatagaacctacctgatcttagtagtctgttacagtttggactctattggttgatgagatcagagcccgggtaatccaatcatctctggaagagccctcacacatacccagaggtgtgccgtcctgacgttctaggtgtctctcaattcaatcacagtgatggcgagcgtaagccgcacaagccatgcaggtcgttcgagctgtcgctgacttacttgagtcccaacacttaccaacggagactagagcaaccaactcagcccctaagtctttgtgtcaatgtttttacctggggatggcagtgacttctgcttcctggtgttcctgtggagagtaaaatgaagttctagtacccattgtacttatcacactgtccggcttatggaaaatactctttatatgtctgttgctacctgaagcatggctgtgaggaaggacactgtagtggtttgaatgtgcttggcccaggaagtagcactattaggaggtgtgtacccttgttggagtaggtttggccttgtgggatgaagtgtgtcactgtggggtggggggtggggggcaatgagaccctcctcctaaccatgggggatccagtcttctagcaaccttcagatgaagatgtagaactctcagctcctcctgcaccatgcctgcctggatgctgccatgctcctgccttgatgatatgataatggactgaacctctcaacctgtaagacagccccagttaaatgttgtccttataagagttgccttggtcatggtgtctgttcacaggggtaaaaccctaactaagacagacagtgtctggatagagtaagtgagcaacctgtttgtgctcttacttatgctaatgttagcacttcgtgtttagaaacaatgaccaaccagtaattgaaagaaaggcaaaataccaagggtgggttccagtggtgaccatgagtgctgtgccttagtgtggaccagctggccacaaactgtgctaaacagaagcaaccaaatcctaagtgcatattcatgctagctggaggaggatctctatagagctaggctaggaagatgcagatgtcccagtggtagtggcttctatggtggataacaacacagaagcgttgttctaatctcacaaaatcagtcaggcacatgacccataagcttgtactgtagctatgccaagatcaagaaaggactgcattattcaggacccgtctacaatttgcaataagtgacttttgaagttcatatcccaggattccttactttggcatcggatttgcttcctactggtttttccgtgctgaaacatcatttctgctgttcccaaacaagagaaatttgacacctttgtacagcttgaccaggcttgaaattgcattttatttgattgctcagctagtcagataaatgatcagattcagaccttggcagggaacacccacagggctggccatccccctccttgtgcttcctgagaaagaagccttcatgacatcatgtacgaaaggctcacaaaaaacgaagttgttttcttcctggaagaaggcaatgcatctcccatctcagcgttcttcattcataggattaaaggttgatagaacaaacaagccattgggtttgaagcattctgcagggtgtggtcagtcttccccctgaattctggaagacaggtttatgacatgactcactcacagttaacaagctgtgagttccagctacctttggcacgggagaacagacttctagaaaagaatagaaataggtgaggggtcagagatcaaaaaaccaggccatgcattgtggacaggcaggcaagcctcacgtctgcctcctggaacagatgggaacaggtatcctcatccatacctgtgattgtgacagtgttgtcctagctggccacctgtcacagagcctgtgacattcctctacaccgcagatcatgttcaggcctggagcttctgtttcagacccactgggtagcttctgagatgactgccctatgaagcagccatagacaccctcagcagccccagccctagctcctcatctccatcggccttctggcatgggttctggcctctggaaaggctcattctgtacaggctgctacttctaagctgcattgttacagtgtgcacagcctatagtacgtggttgggtctgtcctgccgtgatgccagaagactatcttcatcgaagggcagcgctgtccttgtggcatgtgcagattgagagggaagacacatgacacaggtcatcacagccataatcacgtaattaagttttgtgacaagacctgggtggtgcctggagaggcacagacctgggtaggatggcccttctgcacgtactgcgtgtggttacatttaagctgaaacctaagtaggaaatccgagaaagagctcagggacagacctttccatggccaggtagcaaaacagaaaaaaagcacaaaggtaaaaaatggagatggtagcaggaacaggtggtagtcagagcctgcacctgctgcaggtggtggtgggctgagcctgcacctgctgcaggtggtgatggactgagcctgcacctgctgcaggtggtagtgggctgagcctgcacctgctgcaggtggtggtgggccaagcctacacctgctgcaggttctttccaaccacacgaactcatcagtccttctgaaccctgcaggataagcacctccccatcctcacactagacacgtgtgcttagcaacatggagaggctaggtggtagggcaagatcatgagaaccatcagctgggttctcgccaattggtggtgagatctgaaccccggtcacatggatccctagaccacattaggagcactactgagtccttaactcagtcaagcactttgtggctggaaccagttatgtgaggctaaaagatagaagccaggtcatagtgaccacctaagcaagttagggaatgccatgatctaatttgcatttaagggacgcatctgctagcttgagaggacagtaagttcaaggggagataaagggggcctgcaaagagggaagttacagtagatatgacatcatccatcaccccttcctttcctggcccttcctgtgcatcttatacctggcaccatgtcaccttctgtttgtggttctctctccttcacttgagtttcttcaggatccagggagacatcatctagaccaaaaagtagactaaaggaacagaagagaaatgtttacaaagataagaagttaggtactttactgggtatgttggtcatgtgactgtcacagagtaagctacctgtggctgatatctcaaacagagtaatactcagatagtactaggggtctattattaaattttccatttgcttaatatcctgagtgaccaagattattccccagctcgacattcttaatgagtcaagaggtcactagctggtgtaacagcattcctgctccatctaagagaccctgggagtctgcagctgatggaagccagagccctgtttgggatggaggatggctgcctctcttggctgtgctcatggcctgtagtgccctcatggcccaacatgagaacacaaagcaacattttggctcaggcctctgagttccaagcattcttagcatcccagacatctaaaaacaagcatctttgcttccacatggccaggtctcagagaggtgcccatttcttagcactctgcactgtcattgaaacacgcatatttcatagaatgtacggtatcattagcatgccatcagatgggttctcaacaactgaaaggacatgcttggttcaaaacacagaacagggtttggggtgggggcggatcaatgggaaaagtgcttgctgtgcagccatggggacctgaatttgagtcctcagaagacacataaagttgagcatgggnnnnnnnnnnnnnnnnnnnntcttaatgagtcaagaggtcactagctggtgtaacagcattcctgctccatctaagagaccctgggagtctgcagctgatggaagccagagccctgtttgggatggaggatggctgcctctcttggctgtgctcatggcctgtagtgccctcatggcccaacatgagaacacaaagcaacattttggctcaggcctctgagttccaagcattcttagcatcccagacatctaaaaacaagcatctttgcttccacatggccaggtctcagagaggtgcccatttcttagcactctgcactgtcattgaaacacgcatatttcatagaatgtacggtatcattagcatgccatcagatgggttctcaacaactgaaaggacatgcttggttcaaaacacagaacagggtttggggtgggggcggatcaatgggaaaagtgcttgctgtgcagccatggggacctgaatttgagtcctcagaagacacataaagttgagcatgggagcacacatctgtcatcctggtgttcgtatggagagatgggaggcagagataggagaatccctgggtgtagtctcccctcccccagcctgaaacctgcttgctcggggtggagcttcctgctcattcgttctaccacgcccactgctgaaacctgaggagccacacacgtgcacctttctactggacccgagattattcggcgggaatcgggtcccctcccccttccttcataactagtgtcgcaacaataaaatttgagccttgatcagagtaactgtcttggctacattcttttctctcgccacctagcccctcttctcttccaggtttccaaaatgcctttccaggctagaacccaggttgtggtctgctggccggacacaacaattggcgcccaacgtggggctgagaaacggcaaaggatttttggaagagacgctgctggttcggagctccataaaataaaggataagggaaattcataccggagaaggtatgggctaagctgagacagcgttaaacccgagcgctggttcacttaggttcagcagtgaggagctgggtaataggcggtaggccgtagctctccgaagctacatgaggtgtgagaaaagaaagggtttattaaaaggaatannnnnnnnnnnnnnnnnnnntgtgggaccactaacctggtttacacagtagggaacaacagagaggccctgtgtcaaccaagatagaagattaggactggcgccgtaattctcttatttcaacatgcatgccatggtcatgcacatgaccaaatatacacgcatctcatatccatccccacccaccacacacaaaccaacactccatcccaacctcttggcattcctttgttgagtgttctacctcaggaaggtaatacatttcgtcatagtgctaggaattggctctgcacatgctagacacatcttcttgcactgagctacagccctagtcccacggtggtagcatagcctgggttagtgttgtctggctcggatctttctaccggtgaagtcatcattgaatagagatggtgtaggtgaaattcattttttcagccccccatgccccaccccatactcgctcgatggcctgttcctaggcagagcagaaatgagatgagcggaaaggctttcactaaaagaacgcagtccatcaagaattgcatgtgcggtggtctttgtaatttgccccattaacatgttgctaccttgatgattcttcctcatcagagaaagaatgtctctcctcttctcctaagtaacttttctagctcagtggcctgtgagcttttcctcatagtagacactttggctttgcataccatatggtctctgtcgcagccacttcgctctctcgggtgcaaagccaatcccagacggtatgttctgagggagcgtggctatagtccagaaaactgatttatggacctaaaccatgaagtccacaggactaccatgtttcacaaaacgccatcctaacttttaacatttcaatcatatctgagaaagaaatccttctaaagctttaaaccacttgacactctcagggagatcaggtaacattttcctaggaaacatggtcttcactaaacatcaaaactcggacctggccacttgctgtgtgttcttgggccggttgcctcttggctgggcatctctttcatgtcctgtggagtggagataaagatcttcagatggtctctccaggacagctgctctgggatgctcctaggaaacctctagtctagcctgtcatggagtgtcatgacaggtctgtgctggggctctgtcacttgttaatggttttggaaattcccctttatcgtgatgtcccctctacagagctgcattatgcccccaacacctgccggctcttctctagattttctttctcctctgctcaaagaaatgtccttagactttctggaccaaggtgggaattctattcctacattaaacccctcagagctccaagacatttatatttgtctagattcaaataatctccctttgctctcatgaacaccaggccaggagtcataacttcacctcacctaccttaacatcagctctcagctctaccaccagcattcgtgggctgccatgaatcagcggattggcttattaacattacctatacaaggactggaaagatggctcagttgttaagagcactagctgctcttgagacggacctgggttcaattcctaacacctacatggtatccacaaccatctgtaactccagttccaagggatgttatggccccttctgacttccacgggtacatacctggtatacagacatacacacaggcaaatcattcatacacataagatagaaataaactttaaaaacttaaaagaaataaactctatgcataggagaaggctacgtcagctctgatggccggctaggccattttctggttcatatgcagctagagacaggagctccaggggggtactggttagttcatattgttgttccacctataggattgcagatccctttagctccttgggtactttctctagctcctccattgggggccctgtggtccatccaattgctgagagttttaagtaaactaatacattagaatcttgcacccagtccaagcagagaaaaagtgctgtgtcattgtctgctgctgttctttttgttgttgttgtttttctcagtaaacacgttgcggctgggatctggggcttggtaaagatgcttgaggtttcagtgtgtgcagagatctgggttattctgagaagttacacatccttgatgtacttttagatgggaagatctcaggacaagactgcacgatgtgatgctagtgtgtggtttctctctgttttgtttttaatagctccagacagctcatccggaactagccaatgttcataaactcacaaaggttctataatgcaggggttaaaaacatggctaagttagaagtgctaaagtcacagttaatagctatctctcattgttgaaggagtgttgtctcggcttcacgtcttggacagaaatcaaataactcctggtttaatgtttagctgagtgagcccaagttttgaaaagtgtcacttttctcgattaggagcagagaaaatttacttgaagaaataatgtttaaaagtgaataataattcagcaaggatggtggggtcatgtgtgataagaatgctcttaaaaaaatatatatggttttggggccggagagatggctcagtggttaagagctctgactgttcttctgaaggtcgtgagttcaaaccccagcaaccacatgatggctcacaaccatccgtaatgagatctgatgccctcttcaggggtgtctgaagacagctacagtgtacttacatataataaataaatagatctttaaaaaatatggttttgcctcttatgaaaggaagagggaatgccttaagctattataatgtcttgccaatttaaattatcttcactgtgaagctaaggttctcaaccatgccctgacccaccccaccccgagtgctgtgactggagggtgccgccctgcataccaggtttttatggtggttctgggtcttcgtcttttagtcagagtcatccctgtggcctgtgatcactttcctcggaattttgatgccagtgtgtagaacccacctgtcagtgggctacagaacttctaacatctctggaggaagagctttcaggactcttccagtttctggtagctccatgttccttggtcatggcaacatcattccactctctgcttccatcttcccccacatcgtccccatctgctgactgcccctcttctctaggggactagccattggccttagaacctgaagccagggtgagtggtcttacattactattcagttatgtctgcaaaggcctttgtcccatggaagttgcaaacccagctaccaagtgccttatatttcagagactacgttttgcctgtaagcttcgcagatgttttagccgacacagcagctatccagaccctcaccaaaccccaagtcctggcaggctgggcagagaagagctgcagagggaaagctggcttctccagtttgcaggcagctcccctgctctgatgcccatgaccttgaggcttttctcaaactgtggctcctctagaacttctgtccctctgggtcatgaacagaatgtgggacactctgagagcagggtgcccagctcacagcaggacctcatcacatgtggctcaacctgaactccggtcactctccaccccagcatgaaaggtcttacccagaagctatggcatttgataactcgcagccctgtttggtgactccagaccaacgtgagtcggcctttctggatggcatttgctggctgaatgcatgcgacttgatataaagaatttctcggtgcctgactcagcaaagggacactgtggaccattgctgttatatcttgtttatctgaccagtagaggtcagaccttaagaagacctctaaacctaccctggggtcagctgtgacaatagctaccccttcccatttacattgtatcacctagcgcaactcaaacaaatatgatttgcttttaaaaaaaaaatctggatattcaggtaatgagcaggataagcatgatttgccacccccaaaaatgtgtgtgtgtgtgtgtgtgtgtgtgtgtgtgtgtgtatgtgtgtgaaccagccacactgtagcaaacagagcgcattgtgcacaagggagcacctccatccttgcttgggtcaggtgctgttttctttcacagtttaaaagaagctggtctggccttggccagtgagagcttgggcccttagtggcagatacagaggtcactgtgatgctgagtgacagaacagtctctttgaggccatagaaactttcaggaagttcttcgtagcttgctccccagaggatttgtggtttgctactgtctgaagccagggagtcccctctggtaaactctatgttatgctcctgtcctctatagtaattatcaggtgcgcatcattatagtgaacagtaaccaaatatccatagcagaccaggctccgctgacaggtgtgtgtgtgtgtgtgtgtgtgtgtgtgtgtgtgtgaaacactgccccaggagaacctgggctcacatgcagatccaggtgagggatgcccatcctgttgttgccattaagaatggcttttgtgattctgtcagccatggcagctgaggcatggctttagatctgggccaggctggaatagcaatggaacaagctcttggggtgaagttgtagaatgtcatggctaggatccctgtcaatgctgagtttgctttcttcccacattcccacaaatccatgcatgtgtgtgtaggtgacttacttacccacccccaccccatattccttaccttcctgctggagtaaccactttctgaacctgactgtgtccttagatgctttcttcatatgtgtggggttttcagccttctgttaccatctcgctgtgctgtgtttcactttgtgttacttgtatcacattctacaaaatttttgttagctttttttctctcaatgttttgaatataaactgtatccagctttggctcccatctatttcattcaacatcctgggtctatgacaatcacctatccgtttccctgttggtgggtagctacatggtatccacatttgtgcttctttaaactggtgatgctgaattctgtacttttgtttaccttgaacacatattaggatttaccaaaatcgagaacagatttaggaaaggagttgcctgtcataataaggtataaggtgggcagtcttttctttctgtgatgactattcttggttgtcaacttgactacatccagaataactgaaattcaaaaatggagggcacaccaatgaaggcttttgttttgttttctgttttgttttgttttggttttcttcataacttgaaataggaagatccacttctaatctgtatcttgaggcaagaagacacacctttaatttgggccacacctcctgctagaagcctggataaggatgtggaagcaggaagcttctggcttctgctcttggcctgtttgcccttgccttgctagcacatccattccttcactggcattagaggctacttcttcaggaatccagtatctgctgaaccagctgagacattccgccttgtggactgctgtatccttggacttcccctgtgtgtgtgtgtgtgtgtgtgtgtgtgtgtgtgtgtgtgtgtttgagagagagagggagagagagagagagagagagagagagagaaggagagagattgattttataagtcctgctacactagagaaccctggctgtgctaatacagccactgtgtttgccccaacacaggaaagaccagtttaccctccaccacaatgtgtgaggatctgtctgcttgtcacatccccaccagtcaaagctttgatcagaatgaccaaatcgaaggtttcaacctgacttctgtgaaatcccaggcacttacctccctgggatgccctgaaggcaaagcagctcctccaatgttcagcgctgctgtttccggggctgtttttgtcattggcatagcctcctactccacctcctcttgtgagcacaagggagaggtggccttctcttcctaggaatctgttacctttactgctgttcttttctgttggcctccttgaaaggcgccacgtattcctctgggctgtgacattttcataggtttttgtttttgtcttaaatgaaagaaaagtgaggtctggggaggaacacacagagcagatctttaaggtcaacctgcagaggtccatttgctctgcctctgggaccgtggtgtgggcagctcctgagccctccccctaccaccctacccgaccactcccctcctgccagaggtcatcagaatgggaaagaaatttgctgtcttagcgtttgtcttgcttttcctttttaaccacagcctgtagggacacacctctgttctcagttctctgctcacttgttcatttgggactttaggtcaggagttgcccaatccaaagccacaggtagacacagcttgccaccctggttcattgtataattgatcttttaaaccatagaggatttaagaagtttatcaacacatgccagtacatggatggtaaattctctaccccaatgtctagataaactttcatagtgcagatgcaaacttttcataataagtctacctaagtgtaagtctacctaccaaatatagatgctgttgatatctggtctataccccactgtgattttgtagggcatctgtgactatatgacagctatataatgagataacagtaaatgtttcagattgtacatgctttatatactaaacaacttagaaaacattctttggtagtaaatgtattcctacggtgtccttttcaatggctacatagtaatcctttgtatctcgaaggtttccagagatcctttagcatcagatatgttagggctctatattttgctgtgctgtaagaagcagtctcgaagagaacattcttaggcacggatgtttgtgaatatcctgaatttcttgtaaaatatccgggaattgctaaatcaaaactggcacataacctcaggtttgttcctgtcctgggtcatttttatcaccaatttgaggcaacctagagtcacattggaagaaggaaacttatttgaagaatttcttgatcaaattagcctgtgacaatatctatgagagattgtcttaagtgatgattcgtgatgtgggagagccagcccccagctcactgttggctacactatccttaggctggtgggtctgggctctataaaataaaaagctagctgagcgtgtcccagagcctgagcctgtaagcagcttctctccacagttcctccttagacttcctgtcctgacttccctcagtgactgattgtgccctggaagtgtaagccaaagtaaccctttcctccccaggttgcttttggtcatggtgtttatcacagcaatagcaatcgcataaggacaatcccatgtggttgtttagcatgaccagggtaaatcccatgattcttttggttgagggacattctctaagcatctgttacttgcaggcatgtttgtggctttttgatacagaaatacttttgtgatctcagaggcttatcatctgggaggtccaaagaagcaattgagctagcggaatctgcatgtaaggcagcggcggccggtgtgtgtgtgtgtgtgtgtgtgtgtgtgtgtgtcttgcgatgattcctgtgggtcccctccccacacatgactttccctgactgggtgtgctgtgagtcactttactgcctgtgcatcggtccccactgtcaggtgggaataataatggtgctggccctatctgcctgacagatgtgagattcaagtctcctcatagatggaaaagtggcttagggaccgcagagcattctttcagtgctgtataaagagactcgacaatgctgtcctggggcacatgcaaagggcatctcatgaggatgctgttcccacccgagacttcccctgctaatcaggaatgtggccaaccacagatcccacccccttgcctggcactcatcctcggtgggagccagtggggggggggagcacaccctcaactctcacaaaacccaggttcaaatccctgtgagtgagcaccattctgtaggacagtttctaccactgtgcgtctggtgattgtgaaatccttgtgggaagtcaaaggaatgaagccttcaaagtgctcggtccaccactgggcgctaacagatgcaacgcataagctctttactgttatcaccattgttttggttattgttgttgtgagcagatatagagaaaaatgtattccatcagccctttggtgtattgcaaagccacagtttataatagactgggtgttcggccatctttccggtacttcctaaatagctccttcctggtaaaagtgccctgcagtagatacttggtgactgacttttctgagcaaagtttacagaggactaattcactagtgtagaaaatgaacagacatcctgcagatttgtctctcaattcttcttgtgtctctaaacatgtacctggaaggagatgctatgacatgcttcaggtcatatcatggatcatagcagacagggctggagcaaggtagcctgacaggttgccagtcctgggtgattaatagcagttccagtccctgtgtgctgtggatccaggctaccatgtggttacattgtggtttggtttctaaactatccaccaccaaaggacaacagttctgttcacttaataaagatgtatttgcctagaattctagtgtctgaccctagggtttcatacggataaaggcttagctgttgcactaaagaaatatcagcttgcagtggaaggttagagggagatttgctgtctctgccatggcaatcctgtgtcatatacttcctgcagacatctgggaacccagactgtatctccatagatacgccatcactttcaagggtgctgtttctgcctgcatagttagaacaggattctctatgtctagttggtaatggggaagaaccattcacttctccatatttgaagttagaagaacaacacctttgtgggttcacagcctatttgctcaaatccagtaacacagctacgtctgactgcacagaaggctggcacatgtccctcactagctagcagacaggagtagacacttcaagctacagtgtagaggagtccctgttaccccataaggaaagagtgtctcctagaagacaccaagtttgtcatcagaaagggaagttttgtttgtctttttttgacggtctctcttatagctcacactagcctggaactcactgtatgtccaaggctagcctcaaactcatggcagtctcctgcttcagcctctcagatgctgagacattgcgggtatgagccagcataccatgctcaagagtctctatattgttttccctcactctcagatttgggagagtaaagccctacttcttgaacggtgttgcccttcggtctgcctgaccagatagcctctgtatttggaggacagatgtctgggcagacagagatggtgtggaaggaactctgcctgtgcttgtgatttcccagggttgggtacaacggcaaactgtgagtctcttcctcccacccgtggtatattccccttggacataggcacagatgtggtttgaagatgagctggaatcaccaaccttggccgtgtcaccacattacatttggtgctatatcctggcacgtggtttttgaaaggagtgctctgctgactgcacggagcttgaacttgcattaacctgctctcggtggtccccgttgatgaggctcggccaaatgaacaaagccgtagattactcttccagatggcttctttatttttagttcggtaaaccatttctagaatctctttattccttctcaggaaaaaaaaaaaaaaaaagaaaaaaaaagatctgagtgactccaatcaagggtgacatcagaccctccaggaaagacactttgcttagcatgttatcacatggcatgctcacagaagtcacagaaattttctgtgactgtgcaaggcctgcattgtcatctgggcacacgtatgattagacaagagactgctttcccagttcctggcggttatgaatggaagtggtgcctggtccttctccagggacgtctgtgcagcactcgctatacttgcacagctgcaaagaccaggtggagtcacgaaccacaggtgactcacagacccacattcctcaaccaaggtccaaaatagaaactatgtaaacattctccctggagagataagatctttgtttcctaaggcagccatagcaagttgcaatttagtgacaggaaacaacagaaagaggtctggtgggcagaagttcaaagtcagggtgttagctggctagcccttccattccctgctctcccctggtctccgcagctgccttttatgttctttgttgtggattattccaccctctgcctctctctgtggctctgatcgcactctgcttcctggtataaggccatcattggatggatttaagagctaccctaaattctaaatgagctcatcccagatcatcaacttaattgcatcttccaagaccctgtttccaaatcaggtcgcctttgaagatgccaaggattcagacttgggtgggtctaacctttaagaagaaataattcaacactgtgatatcagagcaaacatgtattaaaaagcaagctaagcccattgccaccaagccccatgttgtgtcaactgtaaggacttgtagcacagagctctagaaacgcatcacagctggagagtcccagaaagttagctttatgtcttgcagaggtagttctcatgctaggtggcgcacgcctttaatcccaacactcaggaatcagaagcaggggcatctctgtaatttgaggccagctagatctacataacaagttccaggtcaactggggtacatagtgagatcctgtgtgtaaagtaatgtatgtattcccatgcagagagagagacagagacagatatagtgaggtacatagattgattgattgattgatagattgattatggattgcctctggccatgagacaggcccatgttgacacacaactccatttgctcaactgtcggtgaaaccaagtctcacaccttgtcagccgcactccttcatgtgtgccctcttttgcgttcacgcagttagtgtggtggatgcagtgtctatcgtttatctctctgggcttgatgagtgctactgtgcttctccttgtgcgccttgtcaaacattttctatttcatgcctttgctgtttgttgttccattgagcttgatgaaaagcaacattttaaaaggcaaattagtacaggacagtttggaaaactcagagctgtaattttctcttgtgagactcaatggatgtgttttccttcactctcctgcctgcaggcctccactcctctgctccacctcatgcctggtggcaggaggccagccccaagtttcagtcccctccagagaaactggtgtctctttaactgcatgatgctaagggatggtttttatttccctatctgctcaagtttagaaaacaaaccacaccagctatgtgtatgaaatcaaagaaattataaaaacgtaacaattcttatctaggaccctatgaaaaccaaacctaagaataataggaatagaaggaaaagactcccagctacaaggcccagaaaatatttccaacaaaatcatagaagaaaatttccccaacctaaagaaagagatgcatatatatatatatatatatatatatatatatatatatatataaagcctacagaacaacaaatagattttccagaaaagaaaatcctcttctcacaaattatcaaaacactaaatgtacagaagaaagaatattaaaagctacaaggggaaaaggccaagtagcatataaaggcagagctatcagaattacaccagacatctcaacagagactctaaaaaaaaaaaataaaaaaataaatcaagatcaaataaacaattaaaatcatcctataacccctaaggaaatagaagcagtcattaaaagtctcctaaccaaaaataaataaataaataaataaataaataaatttatttaaaagcccagggccagatggggttagtgcagaattccaccagactttcaaagaagagctaataccaaaaaatttattcaagggatattgtagtcagagcaagacaaggtatgaagtggatttgaatgtgtgtcagagtgggatggccttgaatgctgccatcacttcctgctctggagattccttggggatttatccacagggtgttttctgtgcagcaatgttcctgccttgcacgtctctggtactctgggcctctagccctttctttaaggtgccatcctcttgagcataggaagagaacactaccaccccaaaggccccctgtagtcgtttcatagttaagaaagaccaggagccttgaagataccatgcatgcttcctcagtggttgggaaatagattgttttgtgtatgaacacacctgtttatttaaagggggtgctattgagatcttaagcagcaaggaaaactggaagagaaaagtggcattctatgctgccacacacacacactatgaattcaacaacgttataccctgatcttcatatatgcacagtggttcacaaaccccctgtacataccatgtacacttatacacattaataatgcatgaagtaaaaattttaaaagaaagtcgacaatgcgtcattattggaacaggcacatgagacagctggaccctgtcctcaactatcaagcctcaaggctcatcctgagagactcaactctctccagcaaggctctgtcttctaaatgttttacacccctcaaaaacagaactaccatcagggagtcaggtatccaacatatgagccaaagggaggcacttcacactcaaactaaccaattctcaagagaattgacaacatgacttctgacagaggatggtataagagcaaccacaacagcatcattctttcttaagaacatgaatgcaaagagccaagaccctgtcagctggtgagtgggtggacacgtgtgatgtgttcatactaaagagtataactgagtggtcagaagaggtaatgtactggacaaaagtcatggaccttgaagacagcacacggagtaaaagaagtaagacaaaggtcacatactttactattccacatacgtgagattctcaggaaacgaaacttttggaggaaggaagtcggttggtagtcacggtggactggaagggaagtagctgctaatgacattgttaggtgaagaaattcagtccgtgatcaggtctctgcgactgcactcagctattgacttgaacaccttagatcaaagagtcatgtggtctgtgagtcgtatttcagtaaagctgtcaaagttattaatgtacatgcttgcctgtgcagtccccactgacagtaataagttgtcatgctgctgtaaagtctactcactgggcacctgctgagccttgtctctgtgttcacgacttcaccacatggactgtttggtggtgataagcagggaagaagctatgctaattatcaaggtcactctagccctttccattcatcttcatgttcttaaaggctatgctgaatctcaaggtctgctatgtgggtggggcagggtggtaacagacacacacctcacacctgtggaaggtagaaagccacttccatgccctcttcctggctcctttgttggtgaggtgtcagccaccagctttgacccatttacaagtgcaatgagggtccatccttcagtgaattttttagtactgagagagttggtagcctagcagcaaatccctagtggccatttgagtaaatgtgagttttcagagatgaggttggtggtagagttcaattttatttaggataaaaacttcatggaaggggttaggtgacagctcaatcagtaactgcttgaaatcaatcaggcctagcgtccatccttaaaactcctctcaaaaagaatatggcggtacacacttgaggtgcccattcaagggagcaaaaccaggaagatccctgcggttcactgagcttattcagtgagctcctggccaatggtagaccctcaaaaacaaacaaacaaaacaaaagcaggttgctccagatgagtgacatcaaacttgtcctctgatctccatgtgtaaagagaagaacacataaaagttcagtgtctggaaacccttggcatcttccagggacttacccactcatttaagatgccagcaaggctccgggccatcagttgaggctgacacggagcctgtgtgtggctgtacagaaccatcagagaacaaacaagttacacagaggtgtgggatagatgggctaccccgggcaaagatagactgagggggatcgttgtagggaacaggtgggagggaagcattccctacatgcccttgtctgttcctgttgcccagttagtggggttactgctttgggtcgctgggaacctctgggatttccataatacatgccagtatctagtaaacagatgtcttcagggatactgagagaatgggtcacaacagacagctcatgaaagtaaggtttgttttgttttgttttgttttgtttttttccagacagtgtttctctgtatagccctggctgtcctggaactccctctatagaccaggctggccttgaactcagaaatccacctgcttctgcctcccgagtgctgggattaaaggtgtgtgccaccacgcctggctgaaagcaaggttcttgcttgatgagcattcgacatctgtgctgtaccttatacagagtagagtacaagtgtctactgagttcaggaatgttaaaacgacagaattcatcatagggaaaggaagaaattaaagcaaaatgaagccagctaagcatttcagctgttaaatgtctaagataaataacacatatgaatcaacacggtaaaggaactaaactaggtggctgcaagattcaatagctcagcagcactgtggggttttaatttcattgatcaggcttagaccccacacacacacacacacacacacacacacacacacacacacaggaacacaatgcatgcacacacatatacatacatgcatgcatagacacacatacaaacatgcacatacatacacatatgcacacatacgtacatatatgtgcacacacacatacatatacacacacaagcgagcacacacaaacacacacacacacactgtcatcagtgtataagattcagtaataggggtaaggtttagatttctttttctctctgctactccagtgtctctaagcatattgtcaccttagttgaagagggaaaaatcctgctaaatttaattattcttcattaaactactacttgtcaatgggaagtaaacataattcaataaaagtcaggcaggattgatacacacctttaatcccagcacctgagaggcagaggcaggtggatctctgagttcaaggccagcctggtctacagagtaagttccaagacagccagagcaggcagagaaatcctgtctaaaaaaaaaaaaaaaaaaaaaaaaaagaagagaaaagataattcaataaataatattttcaataaacttgtcagcaacatgaaggaataaggtatattttagacattcatcagtaagatgaaagggttaaataaagttgagggaaaaccaggaaagaatgatgttaaagtctaggaggcactcatagaaatccctaaagacgccagtaaataaattagtaaagaattcaaaaagagaattctcaatagaagtatcatagttaacaagtgtaaaatattctgttaatctaacagatgatttaaaaatagggggaaaatgaactacaatttctcctctctttaattagcaaaggttttatcttactgaataacacaaattgctggtaaagataggatatcaaagacttatttttttttcatttcagaatggaatgtaagttggtaccactcttggaaaccagtatagcagtgcacagcggaagctctacagtgtctgtggctattctgtctctggaaatctcttttaaaaatgcaaaatattaaaattacatgtctcaatatgctccttgtgctataacttccaatggtggcaaaataatgaggcaaatcaactcttgtacattcatttaagaatcctaaagtcacagggatgtaacaaaattcatttaacattaaataaaataaaggtaatattctacatttatatttactctatagccatacaaaacaggcaggttaaaattaccaaggaaaagtacactgaatcaatgcagtggagctggtgttctggagctttgaggagactctcgggaatgtcttaccctttgttttcttatttcatgatgcaggcacttctaacttctaaagcatcattatacatagatttttttctctctccgtgaatagaatattcattaatattatgtagattacttcagtcaataagaaccggaaaatgcagactctgttgactagcattcaaattaaaacattaaaaagcatttattatcttttaatttttatgtttatttattgtatgtatatacatgttgcctgaatgtatgactgtgtaccacgactgcacctggtcccgaaggaggttagaagaaggtatcaaatcccccagaactggagttacggatggtgtgagcgatcacgtaggtggtgaggatcgaacttgggtcctctggaagggtagctggttttcttacccctgagccatctctctccagcccaagtgcatatcatcttcatgatgctcaggacaccagagctcagttctacctctgcccacccacgcagggtttaactgtgtcgctttcttttctgatttgcatatttaaaatcagaaattgaatcagctgagtatgcacttgcttcaagcaagctgtgaattaccctcttaatgtgtttcctttagggggggaaggaagcagagactctccctgtcaacacctctgccaaaaaccataaaaatatgtaccttacgtatttaaatacttgatttagtgtgtgtctgtgcctgtgtgtctgtctatgtttttgtgtgtttatgtgtttctctatgtgtctgtctgtgtgtgtgtttgtgtgtgtgtagttgtgtgtgtgtgtgtgtgtgtgtgtgtgtgtgtgtgtagttgtgtgtaagtgcataggcctctgagtggacatgtaaaagccagaggtcaagttcaggcatcttgctctattgctttccacctttccatttatctatctatctatctatctatctatctatctatctatccatccatccatccatccatccatccatccatccatccatctatctatctatctatctatctatctatctatctatctatcatctataatctatcttctatctatctatatatctatctatctatcttctatctatctatctatcttctatctatctatctatctatctatctatctatcttgagtcggagactctcactgaagatggaatttcctgtttcagctagactggttggacagtgagcctgggcctgcttctgcctccccagcactgggattaaggtgtaccccaccacactgagctttgacaagggttctgggaatccaaactctagtctacatgtttagtagcaagcactctgcccactgagcaatctcctgagactcttaaagtgtttaaagaaaacatcattggggtcccatttacaaatcataacactttctccccctctgccttgctcttgatcccaaggagcacacgtgaaactataagttactttttttcttgtagctatatctgcttgacttgccagtccagtggacatttaagtgattatgatgagagatttctacctgtttctcagactctctgttagccactaacagacagccaagatgttcttagacatgttaaaactgatggtagattgtttgtttggatacccactggactaagcagaccttaccgctggattcatatttatttcagtagatattatcatgtttgcaggatctactttagttaaaaacactcttgtgtgacaacaaaacccactatctctagctacatggtccctggctttccttccatttgagggtttaagacttcaggtttgcagagcaagaatataccatgtcatctctcttattcaagcaatctgtgttgtctttaggaagctaaaaaatttgtttaagaacacaattgcctgtgaaagtcagatggccctctctaggggcactgtcaggtcagattaatttgagagctcaggcaggtattgggactcatttaaagatggtcacagacaaaactttcccagctcagaatattctgggaaagcagtacaggttaaggttatgctgggctgatatttgcatctgcccattgacactgtttttccatccgctggtttccgttggcctcagaatcccccgaagtatcaggctactcaaatttggagtgtgggggctacatttcccacacagagaagcatcactttggttgtgatagtgatgtgtgtaactgtgcctgtgtgcctgtgacagtgctgtagcttttccttgttctgtttgctgtttgagtatgttttaagtttgccacgatgaaaggactttgcaaagtctcccaggcaagcctgactcccagccgggttggaaatgagaatgaggatgctgaacggcttactttcagaatccagaacaaacagcctttcctctgcctcacagaactctctgtgctccacattccgtgcctcttccccaatccagcattttgggatttaaaagatcaacaagaagccttctctgtgtgactcgcccatcttgtaaaagtggggattttgtttgagatgtgttgctttacaaatttcaccatctcagatacatccaaactcattccactgggttgcagcaagctactgccctttcacacagagatctcacacataacctttgcagctagctagcatgtgagtgcaatgatgggtgtacagatggacagacggatggatggatggatggatggatggatggatggattgatggatggatgaatggattgatggatgaatggattgatggatatacagatggatgcatgcatgcatgcatgtatgggtggatggatggattgatggatggacagacagacggatggatagatgagtacaagtgctgagcagttcaggtagatatctttataagcagtgacagaacagctcaatcaaaagaacaaggggatgagatcagtgtatctcagacaaccaagacattgggaccgcagcatcacccatctctacaggctgctcaggcctgtcagtccgactcatgtcccgaatctctttaacaaaaatgtgcatttcagccacagatcatgtaaatacatcttattcatttagtcaggcagctggccagttcagttgaagatgcagcaagtcaactgagtgatttggccaagaagtccccagacgtaaagagagggagggaaggatgggaaggaaggagaactaggcagagctaccttgattgtgttggctgtttcagcaagattttatttcaaagaaaacaatttttatattaagaaaactagaaaccctgtcttcccaccacactctcaacttagggagtatctctggccaccaaaaaacatggagtccgcaactctccagcagatacttgctgtatcttcttgtcctgtacttcagctctagcaccatctgcctggagatccatcagctctcagaggttaagaactcttagttccacaggttgccccatttcagttacaggtgtgggctatcctagccactctggtgggtgcaaggtgctgtgttatcacatttcaatttgcacttccctattggctggtgctgttgaccatattttctgtgtctgttggtcattgtttatcttcagggtatgcctgttcatacccttttcgtgtgtttattgagcattgcttattttcatgtcatgcctattcataccattggtctgtctcaaggttgacttaggtatcttactgttggcttgtaagggtgcctgtgccctcttaagcatatgtcagtgggaaagcatcaagtattttaaactgcccagagacattacaagcagtttgactcagaggtgcacacaacctaattccagctaccattttggtaggggagaattctgccattgataatcgatagtggtagagtctctacagaatcaagaatcagtctctggcctgttagcatggtggtaggcctactgagggaatgcagagttatcagagatatcctgtttgcattaaggatatcacaaatttatgaatttctcgtgttatataaatttagaatccctctgtgcggttggaaatatttcgctgttatttctgctagaggtttttttttttttcctttagctaagttgtgtggaaactcaagagataagtagctcatttgtggtattgtgaatttttccaaagggggggaaactatttttccccttacagacagttgaaggaaattatcttttctgtttttaaatgatcataattggccttctctatcactgacttgtaagactatggagtatgtataaagttatgtttattcatcagatgtccttaacataaatatgctaaacttgattatgttaatttcagaagaaaagaacattaagcttagaattaggcaaatataagcaagttgccactgtgtataaggatgcttctctttctggaagaacatctgatctcatccctaaatctaattagcagttgtttattggtgtccacgcagatcccttcctcacctctgtgacaagtgcattgtccaggagatgcagaacattggctgtcaattagaattctgggctggacccctccagcctggattaggcccgtgatggcaggcagcacaacagtgtccgtgagccacggaagccagaggtcaaatgctcagccatccacatgagggaggtggctgttctcagatacgcaggagtgggtctcgcagtcagaaacactttagtcagccggtgccctttgcttttctaaatccgtttccagagtcttatcagcctcttagagctgctgtaaaaaaaaaaaaaaaaaaaactaccacaaacccatagcttgaaacatggaaatctactctatcacagatctgaggttagaagtccaaaatcagcatggtggtcagggtgtgaccccactgaaggagacctccttgctccctctttctcgctgtggatggccctctgcagcttcacagcccataccattgccactctatctttgtctttgttgtcacatgccttcccccaccctctgtctccatgtctgtctgtctgtctttaagtgctctcactccccctccctcttctactctctcttcctccccnnnnnnnnnnnnnnnnnnnnacccacccaccccttcctcactcctctagcatccccctacgctggggcaacaagcctcccacagagccaagggtctccccttccattgatggcagataaggccatcctctgctacatatgtagccatgggacccatccaggtatactctttggttggtggtttagtcccagagagctctgagggaagggggggaggcagttagttgatatttttgttgttcttcctatgggcttgcaaaccccttcagctctttcagtgctccctctaactcctccatcgggatccccatgctcagtctgatggttggctctgagcaccctcatctgtattggtcaggtgctggcagagcctctcagtgaacagctatacaaggctcctgtcagcgagcatttcttatcatcagcaatagtgttggagtttggtgtctacagatgggatggaccccaaggtggggcagtctctggacggtctttccttcagtctctgctccattttttgtccctgagtttcctttagacagggacaatttcgggttaaaatgtttgagatgagtggatgaccccatccctcaactgggggccatggctatctactgacggtggtctcttcaggttctatgtctcctctgttgggtatttcggctaatgtcatccccactgggtcctaagaacctcttgcttccctggcatctaggactttctagtggcattcccatgttttctcgccattgctgtcagagagagtttgggaatacatgcagttaggatgcccattttctgcccatttttccagagagacactggcttttatcagcacatcttctaagagtcacccaaagtgtacaccatatagaaatccccattagcagtgccagggtgggaatgtgccagggtagggtatgccagggtggcagggcagcctcacggtcatcagggacaggtttcccatccctcatctctgcctccgaagcctgtgggttccaccacaggcacctgggcacacaggcacctggtcacacatgcacccaagcaggaaatgatgctggtacatgcctgtgctttgtgcggagggcagccagcgcccttcacgaagcttttcagaacacttctgtgtaatagttccacttatgttactttctctttaaacctcaaattggctcctttttccctctctgagctgtagcaccaataacagaactaagtgctgggccaatggctgaggctttgattgttggccaagatgagaggaaatgagagacaaacctacacataacttctctaatctctccgtgtgaacagggaggttacaggtacagaataaagccagtgaggggggtggggctgggtggctaataaaggggaggatatctacatcttccctgagaatggctggactgttgtgatggtttgtatatgcttggcccaaggagtggcactattagaaggtgtaaccttgttggagtaggtgtgtcactgtgaaagtggggtttaattccctagttgtagctgcctggaagtcagtcttccactagcagccttcagatgaagctgtagatcgctcatctctgcctgcaccatgcctgcctggatgctgccatgctcccaccttgatgatgacgcactgaacctctgaacctgtaagccagctccaattaaatattgtcctttataagagttgccttgttccccattctaagaaggaatgaagtatccacattttggtcttccttcttgagtttcatgtgttttgcaaattgtatcttgggtattctaagtttctgggctaatatccacttatcagtgagtgcatatcatgtgtgttcttttgtgattgggttcgttccttcttagaatggggaacaaaacacccatgggaaggagttacagagacaaagttcagaactgagacagaaggaaggactatccagagactgccccacccagggatccatcccataaacaaccaccaaacccagacactattgcatatgccagcaagattttgctgacaggaccctgatatagttatctgttgtgaggctatgccaaatacagaagtggatgctcatagtcacctattggatagaacacaaggccccaatgaaggagctagagaaagtatccaaggagctgaaggggtctgcaaccctataggaggaacaacaatatgaactaatcagtaccccacagagcttgtgtctctagttgcatatgtagcagaggatggcctagttagccctcaatgggaggagaggcccttggtcttgagaagagtatatgcctcagtacaggggaatgccagggccaggaagcaagagtagatgggttggggagcagggcgggggtgagggtataggggactttcagagaggaaactaggaaatgggatagcatttgaaatgtaaacaaagaaaatatctaataagagaaatagaaaaaaaggggggttgccttggtcatagtgtctattcacagcagtaaaaccctaactaaagcaaccatctaagaatttaggggacactttatttcccctgagacagtttctctgtgtagcctgaagaccaggctgacctcaaactcagagttttcccctgcctctgcctcctgggtgctagaaccactttttaaatcactctttttacaatctcttctgctgtgtccgatgccattgtcaactgttctggtgccggggttaggatagcaatgaaattacactgtaatgaagccactggagtacctggaggtcactctggcagtcatatcagagtctactggcttgggctaaaatctgaagaagtgtccggatctaaactgtcctgtctcagcaagactagggaaagaggaccagaaatgcagctaggcaggcagcttggggaggagctgcctcccctgaccacacttgactatgacagtgcctgcttgccacggcaccttcccctgctggaatgagaatgcttttcctaacagtatggaggtagcacttggggtagaggatctggcctgggacagggaccataggaataaccctgttggtcaggtaaaaatattcatcctcagaaccacgtttctgaaaatacattttcgaagcaacctgttcatttgttgaaaactgcctctcctccaagcctgagagaaaatgaataatttacatctccatttggatcactgctcacttgagtccctggtcattcaggagttgcaggcagactgggagagagatgtgacgctggaccagaactgggcctccgtgagccactgaaactagatctgatatcatgtgggaagcatcccaggattccttgtgcttgcgtgtgcaggcgtgcgtgtacatgtttctgtatgtttgtgtctatgatgagtgtggaggcagagactgacattggatgtcttcctctattcatctgtaccttatactttgagataaagtctctcattaaacctgggctggatagctaccaagccccggaatgctcctgttttgaacttcccagctctggggtgataggtgcccactgccatgctagcacttactgcagacgctggggattgaactcaggtcctcaagcttgagcagcaagctttttaccatctgaccccccccctccaaacctcctcagtgataccctaagatacttatagtccaacattgttcagagctttacttataaacacaaaaactatgaaaacctactggctcaaccattccaatgtgtggttttagacaggaagacatgcttctctgctctgaatcctggtctcagatggcaggaaacacttagcttttttttttatcacttatagcccttccttggggtctagtcagagttcacagtagggaagaatgaaataaaattataaccatggaaaagtacctatcacatagaagtaaattagcatatttaagtagctctgtgggtccttgtcttagttagggttttactgctgtgaacagacaccatgaccaaggcaactcttataaggacaacatttaattgcagttggcttacaggatcagaggtccagtccatcatcatcaaggtgggagcatggcagcatccaagcagacatgatgcaggagttgctgagagtgctgcatcttcatctgaaggccactaagagaagactggctcccaggcagctaggacaagaatcttaaggccctggcaaacacagaagtggatgctcatggtcagctattggatggaacacagggcccccaatggaggagctagagaaagtacccaaggaactaaaggggtctgcaaccctataggtgggacaacaatatgaactaaccagtacccctgaagctcgtgtctctagctgcatatgtattagaggatggcctagtcagccatcattgggaagagaggcccattggtcttacaaactttatatgcctcagtgcgggagaataccagggccaagaagtgggagtgggtggttaggggagtgtggggggagggtctgggggacttttgggatagcatttgaaatgtaaatgaagaaaataactaattaaaaaaccttaaggcccatgcccacagcgatacacctactccaacaaggctgtgcctcttaatggtgccctgccctcggccaagcacatacaaaccatctcagtcctcatcctccacttgtgctagccatgaagacagaaaaggaaggacatcacactctgagctgagacttgattctagttcagccttgacacaaggttgctgaacgtctcagagagcatccttcctcctttagaacaagagtgagatgcgatgactggtccctcctcagaagcactaagctcctagctcgtatagtcatccggttcacctcacagatgcccacagatggcatcacagatgcttgagctcaggcaactgaccagacatgaaaggctgctaccctcacctctgaaaatcaagcaaagccagtcttagagagttgaacgcagaagcacatccccagataccaacgcccttcccagggtgctggagatcacgtggtgccgcctgtcctttaatgaggaggattcgctcggagccatcttcacacagttaattaagtagctattatcatattaagtgccataagcctttattccagagggatccaaatgaggggaaatagcagaggcgctcccaggctatgtagttagaagacgaagaagggatgggagaagggctgggatccatgaggtgccctcaagaactacggggaacctccggtgactgccggtgacatggtaggtcgtggtcagcctcttggtgggaacatgaactcaaactctttgtggctgggtcacaggttggaaaaccagggttcagggtactgaatggctcatgtgatggccattcttggttgcccacttgattacatctggaactaaaacccaaattggagaacacacctgtaaggggattttttgggggggtgtgggggagtttaacttaatctgaagtggaacaccagcttctaatctggatctttgagttaggaagccatgctcttagtcctgatcctgaagtgagaaaacacacctttaatctgggccacaacttttgctggaagtctatataaggacctggaaggatgaagcttttgctctgcctgcttgtaagcaaggccattccttcactggcattggaacatactgtagtgtactatactatatcaaccatactatactataccacactataccatactgtactgtactatactacaccatactacactgtactatactatatcgtaccgcaccataccataccataccgcaccataccataccataccataccataccatgccatgccataccattctgaacatccagcctcatagactgagaaactactggatccttgggctttctgctcatagccagccattgctggattagctggaccacgacctctaagtcattctaataaatcccctttcaatatatgaagagggattcattctataagttctagaccctgaccgatacagcttatgagatgaaaaataaatagacaagtcccttattaataattccgattaaccaggacacttataaaacgcggcctgtgagggagcagcgggaagggcaggcgagcctgtcattctccatttctttcctgacgaaaagtgcaagaacccaagatcaaaagcagcagatgttccggcagccgtttcatctcagggtctggcgggggcagagtggtggactcgctcctcagagtgggacctcggagcggtttcatgtcttttgacccatcttcatacgggctgtttccttcctgtctgcaatttacttttgtgcccttttccctctcttggctcattggctgggttttgaaactagactttattcttcagaagagcccttgcctgttcacccccagatgtctgtagttatctgactttacaccagctccagtgtttatcaaagtggggagattgcactgagatcaagcagagagcaaatttgatggtgagccagggaacagccaaggtttgtccatctcaggcctgttttatcagttctggtgaattatgcatgggctggctcagagctgtcagtacagctgatctccctccagctatggaagctcagacccaaataaggaaggaaccaaggtggcttccttgctgtctccacaacagcttttaagaaaccttattaaagttgagctagcatccagggaactgtttgctgcttgccaggccttcttttgcaaatctgtcctggcaaacccagaacatttggaagttaagcatccctatgacagcaggaccatagcaagggctcactgtacaatatgagattgaactcattgctttgagctactgatgaaagtttatcaggcctgggagagaccatcagcatgtgttctcaagaaactttctgagccaagacacatcatttcatggtattgaccccccccaaataaatctcacctcaaaggggacaagaggtagctaatcctggagccaaacaggagtgagcatgccctgagaacagagatttagatgacctaaaatcttatacacttatgagagagtagtttcataatgcctatatagtaatggggaacctttaaaatacactggtgggaacatcaggggagcaggtaaatacaagggtggtatctctgttacaggcctcagatgacctctgaagacgcatgccctcagccttttggttggtgaaggcgaggtgtctgtacataccaaaggatttgcctaatggtcgtaaagatgtcagtgcacacacagaacagttcagagggctaaagttggcccaagataatctgggtctgaacttgaaacttccaaagccacggaaattctaattagttaatcggaactttcatttgcaatggacatgagctggatcagaagacaacacatactcattgtttgagcacactcttataagtgtcttgtaatgacaatgttgagattgcctctattaattatatatcccttaattcatgtgtgcattcattcatgcattcattcattttttgtatatttaatttctacatttatttctccacatatatgcaaagaatattaggagcctattatgacttctcattgtaattttaagctcgtgacttaaaatcttcaataccagctgcttataatctggcacacaggaggaagaagcaagcaaatctctgagttcaaggccaaccttatcttcagagtgagttccaggatggctagagctatacagagaaaccctgtcttgaaaggacaaaacaaaccaaaaaagtaaaaagcaaagcaaaacaaagaaagaaacaaacaaaaacctttactaccagggatactttgagaaagctccagtgtcctcagagacaaccagcaatcatcaagtcacaagaaagtggagtatttggaacattcctcatggcatgtaataaaataattgatggctgaggtgatgctgtatccgagaggtgttcccttctgattgccatgcctgcattctgctgttaggctggtgcacagagttttgctgaatatctaagagagatgcaagtaaagtgactgtgcccatcttcctcaggcgtaaacatttctgcctcctgctccttccttttactcatccatctgtccatctatccatctgtccatctatccatctgtccatctatccatctgtctacctgtccatctatccatctgtccatctgcccatctatccatctgtctacctgcccatctatccatctgtccatctgtctatctgtccatctgcccatctatccatctgcccatctatccatctgcccatctgtccatccgtctatctgccaatctatccatctgtccatctatccatctgtctacctgtccatctatccatctgtctacctgtccatctatccatctgtctacctgtccatctatccatctgtccatttgcccatctatccatccagcatccctcttcttagttctcctactcattcctaagaccttcagattttccctaggaaactggttaaggggtggctaatccacaggattactcccattgggttattaaccccaactaccacaggcccttcggtcatgaatgagaaaggaagagaaatgaaaagaaaaaaaaaatctgccgtcctggaaatcagctcttataacctcagttactgtagggcctcaggtcaggaagttattgagcagaaaggcagaactcatcacccttcagagtcccctgaacagttacattatgggacccaagccctgcttacaaaaagtagcagagtggagtctctcctcgctctctctccttcatccggccaaacaaactataccagattggcctgagatcctggcaggcatcatgggttccaagtgcctgtcgaactgagaagccccaaagccaagtgtcagacaaaagcattaggcgcttttagcagtgagtgcaatcactggctctctctaagcagggctgttgatttttttttgtcttttttgtcttttttgtccatggtaggaagtgacagttggatgcctggcattttcacatggcctattttccctgtgggaagttgtaaaaaaatatccattaaggctgatttgtatatgcaacagaagggcataacatgcccctcaaatgaatatcattatctccatccatgaagtgagagccatgagggatggcagtgtcctgcaaactcctcagagactaggctcttggcaaagctcaagtatgttgaaaccaatcccttgtctctcccccacttaatgtctcaaggccaaaaacccactagcagatgtttgaagaggttcattattgtctcttctaagcctctgagggggtgaggagaagaggcgggattacaagtctggggaagatccagaggacagctctcttttgagctctctctgcagtccagtaatgcaagagattgaatatgatgctagtgtttggtactcagtggccagaatgaagtcaaagataccacagacccataagcacttgttctgtggagatcgaccctcaggctttctacatgcagccattcctcagtgttccatgtcaccctgctacctgaacagcaataagccatccacttctcttccttctaacagttaaggctaacaagatgggtaagatccacactgctgccctgacgctcattggaaaactggtgcctgttttcttgagattatgaaatatcccttttatttgccacaaaaatccatttaaaaagaggaagcagggttatctttggtcagaaaatggccgcttcgcctccagtcaggcatagaagggaagcgagcaaggtagagccagtaactggataattaactttctgtaagtgccttatggctttgtgttggcatttggttggccaaagctatgttttgtggccatctgaagctataagagaatctgggaagtatgttttgccagctggacctgttgttattcctacaaatattcttaacaggaaaagcaagaggaccatcttttaattaaaggaccagcagtatctgctatgaaggctaaaaatggtgtggtgggattgtttcttctttttttaattgtgtgtgtgtgtgtggtgtgtgtgtgtgtgttatgtgtgtgtgagagagagagacagagagatacacagagagacagagagagatacacagagagagatacagagagagagaatatgtggtctatgcatgtgtctatgtaagtgtatatgtggtgtgtgtgtgtgtgtgnnnnnnnnnnnnnnnnnnnnnnnnnnnnnnnnnnnnnnnnnnnnnnnnnnnnnnnnnnnnnnnnnnnnnnnnnnnnnnnnnnnnnnnnnnnnnnnnnnnnnnnnnnnnnnnnnnnnnnnnnnnnnnnnnnnnnnnnnnnnnnnnnnnnnnnnnnnnnnnnnnnnnnnnnnnnnnnnnnnnnnnnnnnnnnnnnnnnnnnnnnnnnnnnnnnnnnnnnnnnnnnnnngccagtggtcaacattgagcatcttcctctatcactccctttactgagcccaaagtgctctgttttggctagaccagaagccccagcaatcctcctgtctccagtcccccagcacaggaggttatagaagcataccactgtgcctgcctactaagtgggcctggggatccgaacttaggtcctcatgcttgtgtagaaaacccctccccctgccccagccacctccctagctccaaatggtgtggttctaagaagtcaaactgaggactgctgttcagatggctcactgtcagagggcctcaggaaatgtatgcacgatgctgtctctgaggacctgcaatttccgccccatcctttccttaatcacttggtgcatgttttgtgagagggaatagatctatctttcagctaacaaaatagccttgaggctcggaacacattttatcatggaacatctgaaaataactcagctctgaagtaccatgatgaagttgacctctggcaagagggtaaaaataaggctttatccatcatcagcatgagtttggccgctctttcaatgacttagtgctagtgtccacagcatcagctcctatcagcgttaaccaccaccagcctgtctgtggaagaaacgaccattctggagggaagactcaccttgaccttcatgttcattccagaagagaggggctccctgctgggttcattgagctgtccaggccaattatctcttggaagttcaggacccagcagaaccagttcaaaagaatgaatgggtgtttcgttgttggcatgttcttaggaacactaaaagatctggaattctggtgtgctgtctttcagtatgtcccttagaaactactcaacaacacagttttaactattggagcattttaaaatgcaattctttcttctctagggacctgcaaactatacttaatctctgtgctcaaatacattctttgttccaaatttacgactgtaaagcctgttgctgtcaattaaacccagccacctagattacttaaaattcaccaggaagattaatttccttcacataagttgaaatttagtcaagcatggtgatgccagcctgtaattgctgggctcctagatgttgaggcaggaggattgctgtgagattgaagccagcctacattacagatgtaggagctccaggagagcctgagttaaagtttgagaccctgtctcagaaaacaatcaagcaagcaagaaagagagggtggagggaggagagggaggagagggaaaaggaatggaagggaaaatctttaaagcaaataagctcttttcacaacttctctaaaactaggtttctttatgagcgagtgagtgagcgagcacgtgtctgttggagagagtggagcacactgtttaacactaacattaagagttggttaacattagcaccttgcaggcagatcaactagctagcctggtgtttcccttgcagaggtgaatgctcacagccatctattggactgagcataggattccccaatgaaggagctagagaaaggacccaaggagctgaaggggtttgcagccctctaggaggaacaacaatatgaactggccagtactcccagagctccctgggactaaaccaccaaccaaagagcacacatggtgggactcatggctccagctgcatatgcacacaggatagcctagtcggtcatcaatgggaagagaggtccttgatcctgagaaggctctatgtcccagtgtaggggaatgcctgggccaggaagtaggaatgggtagattggtgagcagagggagtggggagggaatagagggagggttttttcggaggggaaaccaggaaaggggataacatttgaaatgtaaataaagaaaatatccaataaaaaaatttaaaaatttaaaaatttaaaaaataaaagaaaatgtcatagacctgtcaaaggattacaaggaagggccagaggttctgctgccttgagttccatagaggtcccaagtgtcatcaggagagtctcactggatggcacctgggtgagcgtgccacggtaacctgaggccctcaggtatgctggctgtgttgaacattagcagagctttgcagaaacttcagggaggtcttctcagtgaaacctaatctgaagaaaataagtagaactgggctggagagagggctctggcgaggaggtacttgctggacaagcagaaggctgaggtccagtccccagcgtggtgatacctgtctataatttgagcatggagggggagagccatgtggatcgctggagcctggacagacagtctagccaattggtgagattcaactccagcaaagagactctgtttcaaaaatataaggctgagaataactgaattagatacttaacattggcctatggcctacaccgtacatgtgcatgcacgtgcgcacacacaggcacacgcacacacacacacacacacacacagtagaataagaatcacaacattacagctgcagccttcctccagatcctcatggatccagggtggctcatagctaattgcccacagacaatggtcatctccagctgtaatcaaagaaataagatcaataatgactgaggcacaccaattacagatatatttacaactaacattttagcgcagcagaaccaatggagaccccagacgatggctcactccatttaatcagtgctcaagaacgtgatgacaatattactaagaactttgaaaggaatcgcaataaggcttgacctgtgatgtttacccttcctttgaattggacttttcatttttttttttattgtggaaagtcaaaacccctccccaccccaccccagaaaagaatgtgtcacaataatacttgttggtgctaagctcaataaacctgaagacactgccctgccccagggagatgctgatgtggaagacccatgccttctctacatgtctcccagaaggctatcattaggacggtttctcttccctgtgttccaaagctgggaaagccttgcctcaccctgtgcctttgataagaagatagcgaagtactctcccttcacaccagaaaatagatgttgtcccttgtcagataaaaagtctagaattgtcctaaatgggtagcaatataattacttgattattacgtcctttgaagcttgcctaaacatatttgtcagcgtaatcaatggaaagtatgggttaggggggaacagggcagtgggtgcgaagagaggttgatgggagagagaaggaaaaacaaaagcagcttctacctgggtgtattagtcagagttctctagagtaactctctccctccctccctccctccttccctccctccctacacacacacacacacacacacacacacacacacacacacacgatttaatggaatgacttacagactgtagtccagctaattcaccagtggctgtgagcagaaagtctaagaactccatagctgctcagcccacaaggctggatgtctggatgtctggatgtctggatgtctggatgtctggatgtctgagctggggttcagtctatgctggcataccaaagaggtagcctcaaatgccagtgggggatgggtgagctagcaagacgagggcaagcaggcaaagagcaaaagcttccgtcttctctatccttatatagactcccagcagaaggtataccttagattaaaggtgtgtcttcctgcctcaagatccggattaaaggtgtgtgttttcccgcctcaaaggtctggaggataagtgggtgcacttcacaccaaccagaaaaatcccctacagggatttgtgtaccctccgtttctggtttgcagtttattccaaatgtagtcaagttgacagccaagaatagctatcgcatttggcttatattggggtggaagtcagggcttaacgtgaaagacaagttcagaagagacacccaactgtagtcatccaatataaagccaaaggtctgtctccaccatcatagtatgtgggcaaaggagggagagggggaagtggtcttcagtttgaacaaacaaggtttcctggggaagagaggtttaaaactgcatcttccattccaggagccacctgtgtctatttaaatctgcagtgttaaaagtaaagaaagatgtgacactccaggtccccaatagaagttactacaactctttttgtataataattttatcttctttgggagttccatgcatgtgtatctgacaaaagatcatatccaaccccacctccctcctgtaactccccaacacacccctcccaactttatgtcatccccatctcttttttaatgaccctctaagtccagctggtgctgctcatatgtgcacaggtgtgagccagccactacagctgtagctctcaacctgtgggtcctgaaccctttagaggaggagtcaaacaaccccttcaaaggggtagcctcccaccctaggaaaaaacaggtatttacattaagattcaaaatgtagcaaaatgttagttacaaagtagcaacaaaagtaatcttatgggcggaggggtcaccacagcatgaagaacagtgttaaaacatcacagcttcaggacagttgagaacctctctgcactagtgcatgggcaagctaccagtggccagcagccaacgggaaatggttctctttttcctaaaagccatcaattgcctgtagttcctcagacggtggtgggacccagagagcagcaccctcacctatttcagagtcaggctggctcgactcattcttgattgggtagccactctagctgtgaggtcaggagtgcaaggtgatgacccatgtcacatccagaaggcaggttttcacagtgctcctccggttgctttcacagttcttgctgcctcctcttctatgatgttccctgatccttgcttatgtgtggggcttgggtgagggtaatatagatgtcccatttagtagtgagcaatgaggctcttcttctcagtacttggcctggttcagcatctctgtactgatggctgcttcagagagaaagaagcattcacagttataaatacaaagatttaaaagataatttggcaacatggccacttagcaagataaccgtagcaggttcttccttatggcgtgtgactgccccagccatgaacttttgaccgggattcttgtaccagctgtgagattccctcctgtggagaagacctcagatcatccaatcagaaaatgcttccttgccctataactaagagagagttaagtcaagccactattacaccagtatacacatcttgcctggcagccgattggtaacatagtgtgcagggtccagcactggataacaacattaatgtggttatccccaccccctccagcagcctgcatagcactgtctagcactgtgaaagctagctaagaggagaggaatatcccagtatcctggtttctctatgtcctacagccaaagtgtaggagtcagcacatttcaagggttcaggggccacatgaagctagtggtgactgaattgaggcagtgtggatttaaaacaaaagcaaaaccaaaataaaacagaacaaaaaacaaccaaaaaccctgttgttggagaggttctattagcgctaaacccaaacctcaatttctctaataagcaaacccttcgtcttctatagaccatgaggaagtctctcatggtgtcacagactgcctttctgcctacacctccatatgtacaaaatatgccaggtatattctcggcagcatttcattggtttaactggtatatgctgcgagtttgactgaaaacaatagaaaaaaatccttttgcagaaagagcagactgtatagactccatgtatcttgcaggttgtagaaaatctcagcaggacgtaaccccaacacaggtcatcagtggagcaatgacaacaagggttcctccccattctgggggtgacaaacttgtaaatagtttggcttgcatccgttaatgtcattctgttcccctctagtggagttaaagggtatctgccatcccactccaacttagagacatttgtaagaagaggagtgggaatccaggcacagttaataatgtcattgtcctccttcctgtgtcatgacatgatgcttcttggcatcgggggaacctatcctacagttctgtgtccatctgaatgacacatggggaaacctagggtgtctgcaccgtgtgtctctatcctgatgtcagcccgagtcataactgcctaactcattccgagcatccattggctcaacatctggctcagagccaggtccattgtctgactcaaaggctcagtagataaacagagttcagatccccagtatccacaaaaaggccagaaaggtgtaatggcttctctgtaacccaaacatctgaaaactggacaggccatcctcctagggcaagcttattgactagactagtcagatcgatgagttctggattcggtcggtgagagagcctaccttagtgaatggagagtcatcaaggaagacatctgatggcaacctttgccctccaggtgcatagatgtgcatgcaaaaaacaacaaacaaaaagggggcgtggtttgacattctgatctgaccacatggtagctatgcattctggttgaattaactttcccagcttcttctccttcgtctttaagatggagatggtccttctttggccctgcatgaggataaataaaaaaggaaataatgaagcccttcaaaagtgaggctggactctgaacttccccagcctcatttcctatctgcccctttgatggcattgtgttagagatgagagatagacaagtagactgtccatgtgcttccaagctctccgccttcacggggagccgtgaggacctgggctaacttgcaggtggttccagaggctcataggttaccaacactttttattatattttcatcttctctttgaatgtgggattcttctaaggttacgccggttagcagggaaaagatcaaatttttagaatatcgactgacacagtgtttccatctccccagatgaaaggggcattatcctggagagcagaggtgcatttaatgccacacccctcttctccactcctttccagttagacacaactgtctgccctgggtgggaataagagtgtgttcgcagtgatgctgccctaagcatttgctctacttctgagaaaacgatcaacagcaacaacaacaacaatgaattccaaatgtgtgtaggtttctgtgcaacccctggagaggtaaactttgcatttttatattagatgaataagtagtgccggtgggttcagatgtaggactggggcatttcaacaaggaccactgcccttgtcacattttagactgagttctggggacctctctcaggattcatttaaagtcacagttggagggaagtatattatcaccgtctcctacggtttaagaaaatggaaggagggaggcaggctagccttcttcagtatgcacgtgtgcccctcagccctggcacatagccaccagtgcacaaatgctcagacataaatgaggaaagaacgtttgaagttagatacagaccagcccaagcatgagaacagtgagtatatgctcgagtcagcacttttcatgggtgaggatcaaggcagagggctttacctagtgacatgtgtaaaagcagatagatcattctaataccaagtgcccaagaaacccggatatgaatacatctgggtagcctggatgacctagaacttactgttatagaccaggctagccccagactcacagagatctacctgcctctgcctcccaagtgctgggaataaagttaccagccaccgtgcctggctaagatgttgtattttcatagcttgggacacccatcggcaactagcaaattcttgagggttcactatgcaaaaaggaagaaaaaacaaaaacaaaaaagatagaacctttggtgtttcacaattcctgcttttcaaaaaggaatgaaagtttctactcaaagcaaatataccataaattctccaggaggttgaatcaggaagaacacaggtttgcagtctacctgctgttattcacagcagagtcagtccaaggccacagagacaacatagagagaccctgtattaaaataataaggctgagaccaagcatgcctgtgatctcagcacccagaaggcccgggcaagaggactactgcatgctcaaagccagtctgggctacatggccagatcaaggttgttcaaggtgacatccaaggcccacccaccccaaatatgaataagaagataaaatgtagggtacaattaacaacaacaacaaaagaaggtgctgaggatgtagttctgtgatagagcagctcagtggtagagtgctcgtcctgcatgcacaagagagagggaggggaggggannnnnnnnnnnnnnnnnnnnnnnnnnnnnnnnnnnnnnnnnnnnnnnnnnnnnnnnnnnnnnnnnnnnnnnnnnnnnnnnngggaggggaggggaggggaggggagaggaggggagaggagaggagagggcccctggacagtataagtggtcactaagcacatggatcgggaagcctgtgctggaaacccccgagctaacctgccgtttgagctcacatggaagagcattaactttcaagctcactcaccgggctcagcacccatccggctccaacaaagcagctgtgtcgaaactggagcctcttaccacaacagatgtatagctcttagatttgatattttaaatactcatctgtttagcctgagatttccattcctgtcttttctcctaaggaactgacagggctcttgccccatgtctgcttataaatcctgttggtcctgattcctaaaacagtgaaaatttggaaagagcctaaatatgtgggaaatggaagttgactaaaccatccatacacaaaatgtcacacagttagatgggacactgctttatagtgacatagaaacaactttatttaaactgttagattgagaaaacctaacagactagtctcctcagaaaatactctacctccctgctgtaactcacatgtctctgttaaattaaatatatcaaaatgttaatttatagttttctaagttagctatgtatgtttttgtcaaattcagcaaaattatatctagttttttgcaatgaatgtaatttacctatataagtgagcacgagtaaaaaattgaaaattaatgtaaaaactagaattaatattgttactgtaaactgtacatttttacaaagtgaggttaacaccaaaaagatcagatactactaaaaggtgatgtctccttcatagttagaatggggaaatagccagaaactagtcaataatcgtcatggggagtcagacatctctaaagtcagaacattgaccatttggacttagcagtccataaagacagcattacaccccctgactctcatgtcaagccagatgctgatgctggggaacctcccaagactgttagcaaggcagaagccacctttgtgcaactagtaaacactagtttcatgtgtgtgacaagaatacgtgtaaaatctcagaagcattatcttgataagacaagatttcaagtttcaagacttgttcttgaccatcgctcagtcagcaacaggacttctcacacaatgacctgagcctgccttttatagatagcgaagctgagtccggagtaagtgggtttctatttatccctgagttattctcagtcttgtgaacttggccatgaatgtcttcgggcataagtccatagagggcgggccggggtcttcatcgttaggatgcttcctgtactctttatttccaaaccatagcattagagacaaacacatctctaatcagcatggacattcttgggtgcctttaaaaatgctattagaatttaatagtgaacaggtccaagacggacatgagctctcagggcggggagctcataaccggaagagagaatcccgagaccggaagagggaatctcgtgggaattggtgaagaccatccctgtatcataagaatgtgatgcagcctcactgaactgtgctcagaacgagtggcctgtggcccacgtcaggtctgcccatagcatcacaccaacatctgcttctgcttctaatcatgctagagaaaaagcaaatgaaggcttccccggaacccgctatatctgtggttctcaacctgtgggtcacgaccccttctggagtcacatgaccctattacaaggcttgtatatcagacatttatattgtgattcgtaacagtagcaaaatgagttgtgaaatagcaaggaaactaattatgtggttgaggttcaccacaacatgaggaactgtattaaagtgttgccacagtaaggaagggtgagaaccctgcctcttataactcacgaatccaagactatttcaataagatactttcctgataaaaaacacttatcttggttattataaacctaggtaaaaataaatgggaaaaatcataatatatattgcaggatatttgatccgactctgaaccctgagattgtgttttttaatggaaaaacctagttttagtcatggtgtggcttagccttagcacataccttttatccaagggctttctgcttgaatattatgaacaggattaaataaagtcaaccataggtcaagagacagagcaagtgaccagttgacaggagacagacagacacacgggaaatacaaaggacaggcattcagtttgaagggcttttaagacaatgtgtagaagaggggactttgtccttctggaagttcatttgaggagaaagatcagctgggtgctctctctgcctctctgagctagcaggctttcacccctagcatctggctcctgagtcttcttaagtaaaatctaatgatggagattttgtttgaaaaagatagctggataggtagatagatagatagatagatagatagatagatagatagatagatagatagatagatagatgatagatagatagatagacagacagacagacagacaaacagacagatttttttcttgaagaactcaatatggaaatgcgagaaaaaagaaatttattttctagattaaaatctcccacgaattgctggtattatagtataaggaaataacactgtatgtgtgcaagattgcatttcccctccctttgttccctcacctataagaggcccatgcatcctgagtccgtctgtatgacatttaccttctcccaggaagcagagtgcacatatacagccccgctaaaggtcaggctgtgcccaaggtggaactgccgcctgcactgttctcttgcttttcttttcctctgccctgagctcggttcaccccacacagtggtccttcctcccttcctcccccgggatgagcagtaggtgctcccaccctggagccagtggtattggagtgagaagtgaatgaggaggtaagtcagtgagatttggacctgggttgttattgctgtgcacactcgtgatacccgaacagtggatggtttcacttagcatcaccagcttaggatgttttcacttggacttcagcctccaagctggacatgggagcccattctgttgctctctgccaactcatagagaacggaagtggagactaagcctgctgaggttctttgtagatagtgatgttcaaatcttcgttgtccactcttggggagggagttatatattctctgccttgttgactcccagctctcctgtgcgtcgtacctgaaccaataaaactggagaagaaatgccggcaccattcttaggtgaaggatgaaagggactttgagtaatactgccctgccctttctctttctcttctgccagacgacttgggtctacccctgtcagaggctgtcctctgaggaagatctcaaagggatgagaaataagtgtgtgtttagctattgaaatttaggagtggtttgctcctgtagcataacttaatctgcccccagtgagactaggatcccactggagtttttcctactcggtgcaggccaccaacacatagtaggtacacagtaaatcattttaaagcaagatgaagacgcatatctggaaagtgtgttgattttcaaatgaacattgcttaagctttagtgtgtgagtatttacacatttaaagcattttgatatcgtgatctatccatggttctttggtaatttgaagtttgacatgcagacatatatcaatacccagaaatggtatgtatatacactatgcaaaataggaagacataagccatgctattcctttaaaatatgttttctgtgtctgtggtgtatgtgcacattcatgtgagtgtctgaggagacagaaagaaggcatcagatccccctggaacagcaggttacaggtcactgtgaaatccctgacatgggtgtggagcctgaatgtagatcctctgggagagcagcaaatgaccttaacctctgagcctctctccagacccataacataacttatagagatgtagactatgctgtcaaatactcttacataggtataggtaacttcttggtaggttgctcaaggaactgcaggcagagtccattcgttatcagatacgatatctgcctcggtttctctaacatgcagccgacatctcgtgaagcaaatggaacggacccagtgcgagcagaggggcttcaccgtcattcgggatacagggaaggtgtatgaatccatgtcctcccctgcatcctctcagatattgttcaaagtgtcctttccctttcatccctgaacctgtctgtccccacacttcccagaggcatgtcgcttacaaatctatcgagagaaaagccacgctattgttcagtagaggaatggccatatttatgtttctggttttgacataaatgtcattctagcctttgtttgattctgtgacttgctctttttgtctgacagtagtccttggcgctcagtccatgctcttagagaaagagctagctaatttgctccaactgttacgtggccatcagtactataagtatattacaatttacttggtagttgccttgctgggggagaattatgcgtactttaaaagactccgtggattcaaggttagcgacagcatcttgttcacctgggcaaagaatctttagaatcctgctgatgaagcttggtttgataagttagcccggctataaagacagctcgtgtttgggcctagagaggtggctcagagcacttgctagccttgcagaggacctgggttcagttcccaccagttcccagtacccacacagtggttcacaaccatcagtaattccagttctgggaaatccaatgccctcctctgatgaccacaggtaccaggcttgtgtgtgctgtgatacatacatgcaggcaaaatactcataaacataaaattaaacctaaaaagatttgaaattttactttaaagaagatgattgttattcatcagaataaaacatggctgcttcacagaagcaaaataaattcctgccaccagaaatgggttctttcttaaataggccatgtctacagcaatgccaaacctcgtcaaaaacaaagttttggttttgtttcgtttagtttttgggttttttttttttttttttggcaacaaagtctcatgtttccaaggctggtatcaaatttgctatatagctgaagttaacttctgaccccctggagtgatgggattgtgtccagttttatatgatggtagacatggagcacagggctttaatgcaaactaggcaagaacttgacccctgagcttctcccctagccagcactgaacattctaaagctcccatgaagagagatctagactgatgtagcctctgagaaggctatggggccaaacccttcttataggtgagacacaattacagtaatagtcatgttatagaaaatcactctggctttagtttttgctaataaaacaacatttttaatatgtttctttctttcttcctttcttcctttcttcctctcttcctctcttcctctcttcctctctctctctgtctctctctctgtctctctgtctctctctctctctgtctctctctgtctctctctctctctctctctctttctttctttctttctgtttcatggagttaaaaaaagaaatttcctaagaaatttcagatcacaataatgatgccagccttattacccttggagcagagtattcagtgttgcctgtgtagtcagcatgcgggtgacatttagacccaagcctggcttccaagtatgattcatgagaacacatcagatggtaagagcagggaattttccttggtattcagaggaagcagcttggaggagccacacaaggaagtcgcgccccagagctccactggattaaaaacagccccaggaactcagaaagcctgaccctgaggctttcaaggataggcatttaggtcctctgagaaacctccagggcatgttggaggaattcagatatgggtaggaaatgcaggatgggaacacacacacacacacacacacacacacacacacacacaccagccaaagcttgccttccttatttatcagataaaaagggcttgtgaagcatctgttcacatggacccattctcatctccatccttagcagctgctgcctccttcagctcagggatcatccaaaggctaaattctgcccatggctggaccactcgccatccttaaagatagattgcaaactcacctagaacacattgcctttagtacgtacatagagtccagccaggaagaatataggaagtccaaagctccatcagcatcaaaatctatgcggtgcagatctaagggcttgtttttaaccaacttcnnnnnnnnnnnnnnnnnnnnnnnnnnnnnnnnnnnnnnnnnnnnnnnnnnnnnnnnnnnnnnnnnnnnnnnnnnnnnnnnnnnnnnnnnnnnnnnnnnnnnnnnnnnnnnnnnnnnnnnnnnnnnnnnnnnnnnnnnnnnnnnnnnnnnnnnnnnnnnnnnnnnnnnnnnnnnnnnnnnnnnnnnnnnnnnnnnnnnnnnnnnnnnnnnnnnnnnnnnnnnnnaggaggaggaggaagaggaggaggaaagaggtcttggaaacatcttgataggaatgttgacacagttttccagggaaagctggtcaagctatgatatttagaactaagagataagatgcaggctagcagacgctatgatagaatttgcatcctcccctccccctctgattgatttttttggaaataattccagatttagattcacaagtgagattttatttgtgcctatgagacagcctgtaggccaagcctccatttccaccacgtacagcaggagtttctgagtggagcctttgagcctttctgttagaatgtaacaggccaggacagcatctgcaggacagagggttttatactcccttcaaacagaggctgcccaaaagttcaaggagcatttacacatgcttcgctaaagggaaagaccactaacctcgttagaggggattactctaagacagacccttctttatgtactaggaccaagcttaccacacatgacccatggggcagttttctctagaaccttcaagcaaagtatgatagaagctcagttctgtgaggatgtagttgccgtgtggagcgtgggtgtaccgtgacagagacaactaatgctagagatgggctgggagatttgtggactcggctttgcaatcccagagaatcctcctctgattgttttgccttctcaccctgctccctggggagctcagagatgccgtttatacttcaacctcaatagcctgtcttggttctatcgcagttgctgatttagtgatgttggttcagagatctttcctttgcttcagactgcttggttagggcgtgtgtgtgtgtgtgtgtgtgtgtgtgtgtgtgtatgtgtgtgtcctnnnnnnnnnnnnnnnnnnnnnnnnnnnnnnnnnnnnnnnnnnnnnnnnnnnnnnnnnnnnnnnnnnnnnnnnnnnnnnnnnnnnnnnnnnnnnnnnnnnnnnnnnnnnnnnnnnnnnnnnnnnccgcaacaggcagaattcttgtggctgtggcaggtagaagctatcacgggcaaagacctaggtgaaatacactgggtactgccaccaggtaaaggtgccagggactatgggtgtaacagagagggagctccaatgctgtttaggacccaaggacctgcaacacttacacataaacacacttaggcttcagcccccactgaagctggtgactctccacctggaaggcccacagcctttcaatctccccatgacccaggctggctgcacacctggctgagccctcagtcagccagatatttgaaatgactctgttaagaactggccacagaggtcacgacatgtgtgtttacttagagaggaactttccacttctacttttggatagatctttggagtcgccctcctcaatcaaccccttcacgtgagatccgtcagttatgggtctcacggacaggttcctctgttgctgtgcctctcgagtccatgctatgtgctcagcaaacaagactggattccctccccagcacacggtctattcaattcacatgttgtacaatgcaagccctttgttataaccatgcatagaaaatctagagacctgaggatgccgcaagtcagctggcggcagggcggcagcatctcctctccactaatgtgctgtggttatgtaagatgctctcgctgggaaagcaggatgaagagcaaagaggaacaggctgtacttgttttgcaaattcttgtgagtcttaagtgatttcaaaataaaaagggttttgttggtgttttctttttctaaatatcaagacagaattgaagggactatttagtacagttgtttccaactttaatcttagcagcagcctcgcctccccgctttgctctcttccctccccaccctcagcggcacccggcacccggcacctcctgacaagctcggggccctgtgagacctcatgtggaaccctattcccacctccatggtccaggattcagatagagaaacctgaggcccagagaaggccaacactctgctcctcagaggctctgctataaatacagacggcctgggcaggtttctgctccagtggctttctgtgaagcatggtgagtcccgtttaggtaacaaggttgtttctcttgtcaggcctggagccatgcattacacgggatgagtttccatgtttctccttcatccttctccacaggcaataacatcagcgtgacctttaagctgggaccatgcatgagctaatctgggccactgagcagtttcaaatttaccacatagggttgattgccaaggaactctctggagggctagagacaatgtgctagaagccagaccgaagagatattccccgttcagcctccattctgacccccagtcaaggctggaatcacccagatcactggatgtttccataactgtccatgccgctgaagtattttagagaaaccttgggcttcgtgaagtttatttctatggctaacaccataatagcctcttatatttttccagctcttatcaagttgtaaaccctttgcatatggtcatatgctgctggagttcacatgagcacatacacctattataatttataaataaaattgagggccccccatgcacttttggtagtgaaggattctgggacctggtggctctccagacaccacacacacacacatacacacacacacacacacacacacacacacacacacacacacacaagaagtagaagtcatgacttcctctctttctacatctcctggcagttagagcctggagatgccatatgggtgtcagatgagtgagacttaggttttcctgaaagaggggcccattgcccatgtgccacatcaatagagatgtgtgtgagagtcagctggcaggacagccaccccagggctgacctgacggcctgtgcatcctccagtgggtttacagtgagctgccactcttcatttgctgctagttgttgatgctgtatctctgcaggcaacctggcttcttgctttccccccagcatcttctttgccctccacattgtggggaacaaccttcactgtcagcatgggtccagataattggtgctgatgctagcctgatccttcggcattctggcccatgtcgcagacatcggagtaactgatcagctgctcttcactccatcttcacagccatttctatctagggaaaatgctcccacaaggacatggatcttttataacctgaagaggggcctttagaggggcaggcagtgggttgcttcatgggtattgctaatcatgagccaatgagatggcttcaagggtaaggtgtttgcttctacacccgaggaccaaaatctgatccctggaaatcacatggtggaagggagaaccaactcttagaagccatccaagaaccttcacacgcgcaaggtggcacacacagatgctcaagtgcatgcacaatatacactaaacaaacaaatgaacgaataagtttacaaataaaacagtattgctggtcatcacacatgtattcagctactactgtgaggtcctgttgtctgtgaaatgacctcttacagcagtgattcccagtcttcgaaccctgagataatcttttctagactggaacagagcatggtagcatacacctgcaatcccactattcagcaagctaacaaaaggggttgaggccagtctaggttacatagtgatattctgtatccaaaaagaatgggagggagggagggcaggaaggaagagggaaggaagagggagggggtagggaaggtgggacaacaagaggaggcccttccccagagtctgtgattgtggaaacatctaggtgcaatatttgcaatcactctaactgatactctgttaggtgaagcctgttgccctaaagctgggctgcgcaaatatttcttacaaggttaggtaataaatattttcagctttgtggcccattctgtctctgccacaaatgttcaacactgccactgtagccacagaaaccatgtcactaagtgaacatggttgcattctgagaagatgttatttataaaagagctagtatatctgtatccctccctcagaaaactgaggtgcagctctggacgtttaagagatggcaagaaccagctcttcatgctgggtagacatctgaaagcttgcacagtaagaattgggtggccagatcccagttttcaatgtgtttgagtctcagagatctgcggggtggggcgggggagtggtcatcacctctctgtaagatgagggtgacgataatataatgaggaacaaagagacatgttcacctttaccacagctaatggatacatctgtgagtgttttggcgtgctcttctttaaacttttctgcatgattaagacattccggaattttccaaactatgccttttaaaagtggtcataatcattcatttgggatacctttagcttgggtcatgggtttcaaagtcaaccaaaagccacacttgcctttggaatcctgttagacctctggcacccaggtgccttggaaagtctgaagcctagcatgtctttttatgtgtatctttatatgtgagcaacacctgcctccaggagagcctgtgcttaatgtatcttcatggagcccccttccccgacccccaccacttagtgtatcttcatggagctcctgtcttctgttcctccctggctttgccctctgtgctctagcagaagctcaggccacccttcaggaagaagcagttcatgaggaaagaaccttgtatgtgcatattgactataacattagcttgttgttcaaatatcatacaaaggtcttttcgctcagtcctctccttgaaggagccgggggctgtgtgtggtggtatgcatccttaatcccaaaactgcagagctgagaagttctgagacaggagggttgaaagttcaagaccagcctaggttacatagtggaggtagaataaggagaggagaggtaccacgaggaaaatgaagatgaaaagaaagaggaagaagggaggaggaggaggaagagaaggaggaggagaaggcatcagcaacagctaccactagaactagcagctagttccttccttctctgtcccctgcatactcaccctgcactggacagtctaccagtctcctactaggacattctaatcagtttacaaaggttggcttgttttgtccttattataaccatgtaacttaggtggtgctgacttccctatttgtagatgagacaggaagaacaagccatttgtccaaatccatgcctctgaaaggtaccagaatccagactcagtatgacatgatatatatatatatatatatatatatatatatatatatagagagagagagagagagagagagatgatagatagtttctgcttctctacctgtgcactgaagaacaggaacctagaacagatttctggttgcacacttgcgctctgtatggtctgctagagaaagcaatgtcctgcatctatacttggggaagggctatcccattggtttcatgctttcctctaactactgatatctctcccacataaatacacagactctttggggatagggtatgatcacaaagtcctgccaatctcaaggttgatctagtttcacagcctaccagattctggaagtcaagagacttcaaaaaggatccagacctcaactcattcatatcagcttcataagtgtctcttctgggccactgccttgctaggtgttggggtgtctctgggtacagggacaggaatactttgaaacactgaatatgcctcctcccagactgtgatgatggtaggcttcaagtgacagcattcatggaaactttgtcattgactatgtacaaattataccatagagggggtgggggaatgtgagtgtttgctacataaaaatgtgatatagtcaaaagacacacacacacacttacacacatacactcacacagtgcacacacttctccgactctagggagcaatacagtctaatactagccaaactgtgcaatgaaaagattgtgagcttgccttaatcaaaactatagccctttcacacctgaaatgaatgttgttcttctccctccaggaccccaggagcaagcacaagttcaaaatccacacatacggaagccctaccttctgtgatcactgtgggtccctgctctatggacttatccaccaagggatgaaatgtgacagtaagttttcttttccagtagttggccaggctctgcagctcatggctgggtttgctaagtgccaaagtctcagaaacttctcaataacagctcaccaccaaagagaagtggtccagataaagacaaggctcaaagactgaggaattaatctcttctccagcttctgggttctggtttgttataactacttgcttgtctgactatgaaccccctgaaggtaatcgggtttataaatggagttagtcggtgctgtcacactgtgtgtgtgtgttagaaatcttcaatccctgtaaaatgcaggctagtcaaaccccacagaagattctccacctccagattccacatttggttggcttcaaaataagctaagaaaccagtcattatcttcctatgcctctaattagtgggtggactgtggaaaaatccagcaggcttctccataaaaccgaagctaaagcgagcatgaaaaccagggtggcatcttgagctccctcaccctgcccgttgatgaacggatggatctatagcagccgagttatgtacagcatcacagaggtcagtgacacaagggacaggaggccatttccatcctcctcccagccatgtctgcatccttatccaataccaaagagagaaaaacatagcctaggaaagtttctgatttgctaattctctagtgacaaatttacctagctcgatgcttaaataaaaatgtgtgtgtttagggctgaaaaggcagctactaagcctgtgtccttaataaatgtcaggaaggcaccagcatgttcttgttcctaaggactgcatcgacctcagagctttgtatcctgaggtgttgggcgtgtgtgagtctctcagagcccagggttcgttcagcttacctagccgtgcaggttaatggccttatcatccatgccagattccaaacacatcattttagtcattctcaatgtttctaaaaatggtgatcctaagtacatttgtaaatgtatttttggctattttaaaacttggagcagggctggagaaatggtgtccagggggtgatgacacctgctaccaagattgacaacctggcatcaatctctggaagccacatgacagatggaaggaaagaacagattcatacagaatgatctctggcctccacctgtgtgccgtggccggggcagcacaataagtaaatgttagcatcatttttaaacatggagcaaaaatgaacactcatatgtgttgcatacatgtcaaccttgtcacagttagcaagaccatgcgacgttaatatctcacccccactcaagtggtagagcttgtcatagagttcccccaatcaatgcactcccctgagaagtctgctggggaatcagggagaggtgtgcccttccaccccatccccacgtgtatattctctttaggatgaagcaaggattttatgtgcccagtaattttaattaccatgcagaaacagatgaattgccagatatggtttctagtcatttgctgctgctgtagcaaagtacctgaaatggggtcctttatgaagaatcaaaatgtatttaatctcagagctctcagataaagcacctgcctgcagtgtggccttgttacaacatgagaacatggtagaggggcctcctctggaaaggtagactgggagagtagccgagagctctcgtctgtttatacagccacagcgccaccataagaatccctcagagtcacgctcacaacctcatgtactactgtctacccccaaaggtctctcctactctgggtgaaacttccagcacacaaactttggggagatctttcttccataacagacattaactagactcacaaaccatccattttagagttttgtttcctggctacccttgagtgtctttgtaataaataaactgtataaatctgaatttattagctaaatttttgacaatactacccatctggttttacatactaggattctgctttagatttcatttggaacaaaaagaactccatttctaaactattttgaaagacattgacccaagccaattttttgtgttattattattattgttgttgttgttgttatttctgtagacttggtatctggggctccttcctggaaggaggagaatgggcagaaggcatcgggatcccaaccctaccttagcagagagatacagaagtcactatacacactcttgtctgctgtctccttggactctgtgcacagttcctcttggtggggaaaatgctagccaccacttatgtcagccaaccctttgtagggtaagaaatgggatgagagtatgcaaaggatctccccaaggtacaaaagctgtttcgagtagagccaaaaccagagtacaatcagtgtgtgtttactcccaagtgtgaccccagtgtgtgtccacttccgagtgtgacccaagtttgcattcactcccaagtgcaaccccagtgtgtgttcatgaccccacagcatccttggtaaccatattctttccgaggccctgtaattatcatcctcaaatttcagctcatgcccaggtacccaaaggtagatagggcttgggtaaccctcgggaggtgaatagcacaacctcgcaagagtcttcgttgctaagccccagccaatacagcgtcttgaacagggagctttgtggacagaaacctgaggagatccacatgtgagaagcagttttcagtatttagttgcagcaaataggtcttatttatgactttttccaaaaaaaaaaaaaaaaaaaaaagtgtgctgctatgtttagattaaacattgagaatgaaaagaatagccaggttctgccttgaatatcgcagatgaatcttgttaacatcccagggagagtgggtgaggattccagaaagcccaaggtaccaggagggcggaaccagcacacctacacagcctcatgtttgtagtcatccctggggattcttctcagggttgcttgctttatggaaataagactgatctttttttatcctccccctgtctcgcctacataatgtcagtgtaaggaatggcttatgccaggcatgtatttgttttacttggattaatatttaaatatttgaagacaggtttaaaatatcaaacacaaattccttaaaaaaaaaataaggcaacatacttataccttctcaaaaatactgagttacttgagggaaagaaaatttttatgaatttcgtatacaaagcccataaattgtcatgttcttggtggccagctcagaaaggcagaaagaattctcatcagaaaattgaatcctccattaaaaatttgcatattgcatacctgtgtgcacataaactattaagtatttagtctgaactctgtatacattcactcctgtagattttgttaaatatttgaaacagtcacagaagaaaaacctgggttcttttgctgtgggaaagactgaacaaatgtgaaatagatattttaagggtattgccactcaaaggaggaagcctgtgctggaagggacatctgctcacagttcatgtcaccagaaacattatagcaaagtgtcacattagggaagaatcggccccacttctcagacaccaaaacacgaaggcagcgatatgagcccatatggccaaccttacccctttgcttttttgattcacagcctgcgacatgaatgttcacaagcagtgtgtgatcaatgtccctagcctctgcggaatggatcacacagagaagagggggcggatttatctgaaggctgaggtcactgatgaaaagctccacgtcacgggtaaggcatggtccgggagaatcattgtcgggcaaaggtcaaggtgacggcaaagcacgtgaatctgggctgggtgacttggtgtctgtcaaggcatttgccgctaattaatacatcctaggagcatactctgtacacaggatttccaaatactcaattgtcatataaagtctaaagcaacatgcagacctgggtgctctgacaatggtcaccatttggtaagactaaaacgaggccaggggagacagatggctggtgggtctacatgctcagtggccttgggttgttaggacctgaaaaatctatgttggaggttgtgacagcagctactgatgtctgcatatccttcccctctgttaaggatgatgtcaggaacttcatatatgatatttacctctctatatacttgactgttagcttcatttcccaggaaagacacaagaagatagagaatgtacagcactgcagaattattaagtgggaagacaggagagcatttgtatccaaaccctcatcctctaagtgtcatgccacatgcatcctcaacaaatggtccagccatggtgaagatatcctagccacgggctatagcactccttcctgtatctgtgtgagctctgcctgctacagcctgaattttcttctagtttctccaggtccacttctagtgcatccacactctcatcaaagttaccctgatatcttgattccccgggacctatcctgtctttcacacgtcccagcctctctgtgtcatgtcagggccttatgtttactagtcaagtgatttaccattgggctgaaccccaaccctccacgttggtttactatttaactcttggaacagtctacactatttctcctggggttcctggtggagtgcctgtaagcttggtctttgacagtgtctttgcagaattttatcagatagggttttatatttccatttgtatttgtagcttttaacttttatcgttaagtcctggaaagactgactttaatggtgtttgcctataaatatcattataaacagtagaatatgtaatagagataagaaagttctatttaagaaaagtaggaagtgggacgattttaaagaaagcttattttgggaaacatgctcaaaatttagagagtgttgttgtttgattttcttccttccttccttcctttctttgctttgttctttctttctctctttctttttttgaaaaataagcacattttcttcgcagaactgtcctttcaaatcagaatgcaagaaactcaaagaattttgaggtgttattctgggtatttttgagactttagctttcaactagacttcctttctatggggccaatgctgtcaccaatgtcaccattctgcctaggaaagaagtgtgccaagagttgtgagttcctgtgctaaccacactctactgcaagataactcttctctgatgagggttggccaatgcactgatctatacgtctggtaatatgttgttaggagtcacttattgctgtgtgttgagcagaataattgcagtgcattttctcctacattgcctcagttctatatggcctcagattctgggtctcattgacaatgtcaggtatggttccatctcacagagtgggcattaaacaaacaaacaaataaatatggaaagaaagagagagacaaagaaagaaaagaaagagagggagggagagagggagggagggagggagggagggagggaggnnnnnnnnnnnnnnnnnnnnnnnnnnnnnnnnnnnnnnnnnnngaaggaaggaaggaaggaaggaagggcgagcgagcttggttgctcccatgacatgacatttgtgccactgttacacttaggtgcatagcttcttgccaggtgagttgttgtagcttgcagtgttcacagctgggtggcactagtgattgctttactcctccagtagcacacacagcaccttccagcactgtgcacacaagccagcaagggcgacatgtccagttgaggtagatttcttcatgttctataactcaagtgtgtactatcttcagcaatagggtcttaccaccacgtcctgaagtgtaactaagaaacagcttgtgatacttgggcagggttatgggaccaataactcaaaaagaggtttggtagcatatcatttgtagttgaagttgtatgcccccatcacagggaaattccattaaaactccttttatatacttatatattttaggaagtttctacagtaagttttccatgtgactctttcaaaaggccaaaagagctactttttaagtatttctgtgtctcatttaaacctgtgagtaagattattttgtgatccttgatttataaatgaagaaattgaggcacaaagaaacgaaatggccagctcctgaaaattggaagtttgactgaaaactttaatagtaccaataaaaggctttaatagtaccaataaaattgggaatctctctctaagatagttactggatatagctcagtgggagattctttgctgaaaactcataaggctccataaagccaaaacaaagtaaaataagatatagttctttatgtaaaggaaacccaaccctagatttagaaagtaaactcaagaaaataactaaaaagtgacagtatcttgaaaatttgtcttattattttggcagtattggtaagcaaacctagggccttgcacgtacatactagacaaacacattaccataaagctgcatcaaatgttcttggtgttttgagatacgatctcactatatagcctgggctggccttcagctctctatctgcctgcctctgcctcctaagtgctagtatgaaggattgtgccaccccatccagctaggagttattgggcagagtcaaagagaagacatccaactcacatttttggcattccaaagtatcaagaggaaatccaagcaaaggagcccttttgtggacaggggctctgtttgtccctcttgcttgctggatggttcagtttgtcctgaggaaagttgttgacgacaacagctatcacttctttagtgccaagggtgtgcctagccttgcctagcactgtgcaccttgtatgcattgtcttgttgcctccacatacagtctcagcaaggaggtaacctttcttatcctcctcttcaaggtgagtcaggggatggagaggagagaaggaaattcactgagccacaaagtagaaggtaatggggctggccagattccgagctcttccttccaacacctagtctctgagcctccccgggtttctcttattgaggagagtctcctttagaacaaacaataaacccacaaatatttttccaaacttgcattcagcgctccaggacactcttgaaaatccaaacacaggacttaaagcccggggagaaaaagggtaccacgtggagggattaaaaagcaagccaattccaagtgtcattaactgccaaattatatggtctcaaaaatagcacactatggggaggtgctccggatgtggaggggactgggaaagaacagaccccatgaaggagactgctgcgagggggcattggaaaggtagagggaagagtgtttggcttgctcgagggagggttaaataggatgtggaattagcatggctttaatgagaacgcaaatatgagcaataagccacagtgagtggagcttagggtccaaatacaagtgatttcctaggaaatgcatttaaactgaacccctgagcagccatgttaattgctagattagctcagtccccatttcacctatgtggaattgctcaggttgaaaataatttccaaagtaacttggggagttcccagtgggagcgcttcactctgggatggagacatccccctttgaaatcagaagtgagttcagttttctagattggtgctgagtttgtgggaaaggcctcctcttccttggtatatttttatgtttttacctttgatcaatgatgctagaggaaaccagaactgtgttccccaccccatcccgccctgaggagatcttaaaaggtttcttatattcttgtatcactttcttatttggtatggaatgatataaaaggaaacttcatgagaagtcattttcagtttaatgttgtaagtaaataggagagaaataaccacctgctttctggctgtttcaggaacacgtgtctcccacagacatattatgaagaatgtaatttcctcatatactttggcttgttagtataacatggagattgaaatcctaacctgagttctcatgctgtaggtgatagggggtacctttctcctggtctgtgactccttgcaacacatagtctgaactccctcttgagcttttttttttttttttgaataatgttttatattattattattattattaggtatttatttcatttacatttccaatgctatcccaaaagtcccccacaccctctcacacccactcactcacccacccactcccacctcttggccctggtgttcccctatactgaggcatataaggtcggtacaaccaatgggcctctctttccactgatggccgaccaaaccatcttctgatacatatgcagctagagacacaagctctggaggggtactggttagttcatattgtttttccacctatagggttgcagatccccccagctccctgggtacttcctctagctcctccactggaggccctgtgatccatctaatagctgactgtgagcatccacttctgtgtttgctaggccccggcatagtctcacaagagacagctatatcagggtcctttcagcaaaatcttgctagtgtatacaatggtgtcagcgtttggaggctggttatgggatggatccctggatatggcagtctctagatgttccatcctttcgtctcagctccaaactctgtctctgtagctccttccacgggtgccttgctcccaattctaagaaggggcaaagtatccacaccttggtcttcattcttccccagcttcatgtgtttcgcaaatcgtatcttatatcttgggtattctaagtttctgggctaatatccacttattagtgagtacatatcatgtgagttcttttgtgattgagttacctcactcaggatgatgccctccaggtccatccatttgcctaggattttcataaattcatttattctttttaatagctgagtagtactccattgtgtaaatgtaccacattttctatatccattcctctgttgaggggcatctgggttctttccagcttctggctattataaataaggctctatgaacatagtggcgcatgtgtccttcttaccagttggaacatcttctagatatatgcccaggagaggaattgtgggatcctccagtagtactatgtccaattttttgaggaaccgccagactgatttccagagtggttgtgcaaacttgcaatcccaccaacaatggaggagtgttcctctttctccacatctttgccagcctctgctgtcaccggaatttttgatcttagccattctgactggtgtgagatggaatctcagagatgttttgatttgcatttccctgatgattaaggatgctgaacattttttcaggtgcttctcagccattcagtattcctcaggtgaaaattctttgtttagctctgggccccattttttaatggggttatttgattttctggagtccaccttcttgagttctttatatatatattggatattagtcccctatctgatttaggataggtaaagatcctttcccaatctgttggtggcctttttgtcttattgacggtgttttttgccttacagaagctttgcaattttatgaggtcccatttgtcgattctcgatcttacagcacaagccattgctgttctattcaggaatttttcccctgtgcccatatcttcgaggcttttcctcactttctcctctataagtttcagtgtctctggttttatgtggagttccttaatccacttagatttgaccttagtacaaggagataggaatggatcaattcacattcttctacatgataaccgccagttgtgccagcaccatttgttgaaaatgctgtattttttccactggatggttttagctcccttgtcaaagatcaagtgaccataggtgtgtgggttcacttctgggtcttcaattctattccattgctctacttatctgtcgctataccagtaccatgcagtttttatcacaattgctctgtagtacagctttaggtcaggcatggtgattccaccagaggttcttttatccttgagaagagtttttactatcctagaatttttgttattccagatgaatttggagattgcccttttcaattcgttgaagaattgagttggaatttttatggggattgcattgaatctgtagactgcttttactagaatagccatttttactatattgatcctgccaatccctgagcatgggggatctttccatcttctgagatcttctttaatttctttcttcagagacttgaagttcttatcatacagatctttcacttccttagttagagtcatactaaggtattttatattatttgtgactactaagaaggatgttgtttccctaatttctttctcagtctgtttatcctttgtgtagagaaaggccattgacttgtttaagttaattttatatccagatacttcattgaacctctttatcaggtttaggagttctctggtggaatttttagggacacttatatagactatcacatcatctgcaaaaggtgatattttgacttcttcctttccaatttgtatccccttgacctccttttgctgtcgaattgctctggctaggacttcaagtacaatgttgaataggtagggagaaagtgggcagccttgtctagtccctgattttagtgggattgcttccagcttctctccatttactttgaggttggctactggtttgctgtagattgcttttatcatgtttaggtatgggccttgaattcctgatctttccaagacttatcatgaattagtgttggattttgtcaaatgctttttcagcatctaacaagatgatcatgtggtttttgtctttgagtttgtttatataatggattacattgatggatttccatatattaaaccatccctgcatccctggaatgaaacctacttggtcaggatggatggttgttttgatgtgttcttggattcggttagcaagaactttattgagtatttttgcatcaatattcataagggaaattggtctgaagttctttatctttgttgggtctttctgtcatttaggtatcagagtaattgtggcttcatagaatgagttgggtagagtaccttctgcttctattttgtggaatagtttgtgaagaactggaattagatcttctttgaagctaaaaccatctggtcctgggcttttttttggttgggagactattaatgactgcttctatttctttaggggatataggactgtttagatcattaacctgatcctgatttaactttggtacctggtatctgtctagaaatttgtccatttcatccaggttctccagttttgttgaaggatctgatggtgttttggatttcttcaggatctgttgttatgtctcccttttcattcctgattttgttcattaggatgctgtccctgtgccctttagtgagtctggctaagggtttatctatcttgttgattttctcaaggaaccagctcctcgtttggttgattctttcaatagttcttgtttccacttggttgattttgcgcacgagtttgattatttcctgccgtctactcctcttgggtgaatttgcttccttttgttctagagcttttaggtgtgttgtcaagctgcttaagaagcttggtgttcagatccaggaacacttcttcctcagtactgaatctggccaccatgtgtgattaaaagagcattccctctgtgtgctctctcacctcctcaaagtgtgtttcatacaggatcccaacaatgagcctcagcttcctgtaacactccagctatcttatcagctcatctattgtgtgacttttcctggagagttagttgtagatgatgtctgtgcacccaaaatagaacccagtgacaggccaaaagagccattctgaccaagtccagcctcaagaatcattgagtttattgggtttacttataggagtgtggacaaccctaaacagctgcatcacagagatgcctcagcccagtgtaattgaaagccttctaagagctgaaaggattaaagccctgtttcagttaactttcctcccagagcacctccagaaaccaggtacatttggccattgtaatttttgaagtcccaaatgagatcgaataatcagtctgcagatgggagtgtaagagcgggggagtggctataatctcacatgagagccctgtggccttacagccccacccctactctttctgcaaggggatgttaacaggtctgctctcatgaggctctcttgcagacaatcacaactgctctgatacaagatggcaatgtccatttcatgcctaaagaacagcattctgcagtagcatctcaacgggggcactcagatgatcaagagagggaccgtgtcatggcatgtgaggtgttcatgggggacttcaacatgcaaaggaatgacagggcacattaggtccctgaggtgcagtgggaacttggaggaagatgccttgactgctcaagaaagctgtaggtgtgttgtgtggcactgttcctggagagatgtagccaaacatgtattcacccacatagtgaacaaacaacagaccaaagtataaacaccaccaaaatcaaacttgatgaatcagtgagttttattggggtatacttagagaaatatgagtgacgggttacttatgggggcagaaatgaatcaaactcagctacctaatcaaggcctaccacaaggggcaacagatcatcaaatctgtaagcctagagctcgctgaatgatacaatctgcagttaaggtcagggataagttagggttagctctgaagaagtttgcttgatctgagcctctaccaggcagtttggctagtctgggagtgtcttttctgtttatctgttcttggggagggacaggcctagtgagtctggtcagtttcaggaacttcctgaagcctttgaattgtttgcttttaaagcctaatgagctttccctgcagggaagaatttctcacctcccctttgaacatcctgtcccctaataaccttctctccaagatgaaggttttttttttttttttttttttttatctccaaggagactgaaacacaaggtggtagcttcatataaggaataaaagaagagccatgaggacaggaaggatggctctctaggcagggatgaagaacgtatacaaaaagcacagtatcgtggaggatttcaaaagaaaagtatagagcctgggaagggttcttgttctttccattttcaaaggcttagggctgtgaccatcacagttcttaggagccatgtagtggaggctttgagttcgattcttctttacatagggagccttttagttgtgagcagttatgtttgaacacacagagcgcctgtcttctcacctagggtgcacagtaaccacagactcactatctgtgctggtgatggagcacaggaataacatgtactttactgagatgctgtgctgagtgcaggttccttcaccgaggacaggtagctgtagactaaccagtgggaggccaccagggaggaatggaaggaagctgctttgtttaagggcaaaactgttaattgggggtcatttctattaagcagagtcttggggtttagagccagattgggaacacagaaggtggcaactgaggaatctggtcctttgggttagcatggagtgggcattctagctaggagccacttatcctcagatgcaaccggactatcctagccattgctattgatgctgcatttggtcacctggttacggcatcactggtagactcctccactccaaaagcatctttcttgtttgtactaagtactggctgtttaaacacttgaagttcaatagtcttccaccaaccagagttggtatccactgaagagccttaatccatggttacactgatggctggaaaacggtcatgttctggtgctgcaattcctcatctccatcacttgctgatctttagaatgaacagcttccatttacttctcatcaagctacagtgctggcttgggctcacaagtcatttttcaccttctaattttcttacgttctgattgccccaagtttcaacagtgggagcctctttcaactggctccagtgtctttttgatgtaatacgccctacatgttattatttctcttgggtacttcctttctttttggaacacaaaagctcacctggtgtctcagtcatttcttcaaggaagtgtttttgttgttgttgttgctactgctgctgttgtattttctgcttgttttagagtaagaaatagtactttaaaatcccaagattgagatgctgagggtgttcagtactcctggggcataccttttcagaataaaggtgaaggctgttttaatgaccccatgatacttcttccaactctgagcctgctgctgccttcccacggcttgtgttcctttccttatgcccttggtaggaccctggcttccaaagcattggtgtgcatgtgccctttccctatgctccagacatacagcagaaatacagttctattatgccaaaacccttatgaagagtaatcctcctcaatgaagatcaagatttggtcacagtgtttctgaggccccagcacaggatacagtcagaatactgttgtttgataactgtttctctgtggaggttcagtagcaattagacacatgttaccctatccatctgtgcaaattcaaggatttagtgggagatgccataacagaactctgtcaactggatggctgtacagtagacatctatctcatagttttggagcaagtccaagatcaaagcagcagagtccggtgtccggtcaggtccctcaccctggcttatagatggccatctttgagcatgcatgcttttataagggcacccatcctaccatgagtgctcttccctcctctccccattactttccaaaagccacactctcaaatgccatcacattggaattggtgttttaatatatgagtacaagagaagagggagacatacattcagctcaaaaaattcagtctccccacaaatcgaacaggtgttctccctccaaggatttcctacgaaatgcacagcttcacccagaaaggttctgaccaaaactttatcattccagtcgggggaaatggcaataaatgaattcagatactgagacaacccgaatgatagctgatatgagctttcaaaaaccgacaatttcatgaacagcaaagacactcaagggcactgttcttggctaaaagaggctgatgggacatggccaccaaatgcaatctgtactgcctgattggatcctggatgcaaagcaaaattccacacagccataaagggcattgaggaccattgggaatgtgaggtttctgtatcagtgtaaagttcctgagtgacaatggttataaagggaattgtggggtagcttaggcatcatttttctgacatacacaaagtatctcaaaggttcaattaaaaacaccaacacacaaacacatgcacatacacgcatatacacacatgcatgcatgcacatgcacatatgcacatgtacacaagctcacactgcatttaaaaataaatgagagagagcactgtgtagccaaagtacgtggaatagaatagtattaatggtaactagtgaatgtaaatgaagggcaggtaagtattcattgtgctgttcttgaaactacattgttagaaattggttcaaattttcaaacccaagcacaaagttccataaggctgggttgcattatgtatgtctggagccctcttctagccaactgggtgttaggtaacctctgtagagagtgttgtcagctggaaggaaaccctggggttcggtagcatctgatcccccaagtagtacagcttccccgtctgcgtcctcaggctccgctgagcctcgtgccactgcccacggcccccattgcccttcccttcagtggaaggcaaggagaggaagtgagctcagaggcccccaagccctgtttgtaagtggctcttaggtgacccttttcctcagttaatgtatcgagtcactgagtgattctcaaagccacctggggctggctgcctgaggcatttcattatgtgccctgctagactacagcatcctccctccttctgtggacagaaatacccagggtttggaagccacctgtggcctgggtccctggggctgtgtgcttcacgcctgttttccaaataccctgattagaaaatgaagtggggaggggcaagcttagccaaagagctaacgggtcctgtttgagcgcatgtgttgcatgtgattcgaggggactcggtgctgacaaaacttcatctagatgtctccctcaataaacatcaagaatgaaggctgggtgagccgggtggtcacgttctacctactccttgggttttggtctcaaccccctggggagtcctctgactctatcaaggataccaggtcagtgccaatctgtataatattttgtcctccaggattctctctttaaaaatggcattgaggagcattatgacccttgcctatgtgaggaatctactataatgtgggcttaaaacctgctacagctatgtcctcattgtaacaggtaacacatattgaccaaatgtactttctctagtacatgttttacagaagttttgccagcccaataactcctgtgtgcagtgttgagttacataacatttcccatgtgacatcacgtaatagcatcagtctattgtttatagaccaggaagtaaagatgagaggaagtccattgactagccccaatccacaggggcagggcggggggggggggggggggatgctctcctcctcagaaagtaatggtgatgatgatcaaggactccctcaatgatctcttccaatgttctccctgtaggagggctcatggaagaaggatagccagccagttaagacataagtagtaggtgcatctgctatgtaccaggcactgatacaattctttctaaactgctgtcaccactgtcactaccaccatcataaccgctgccaccaccaccatcacatcaccaccatcattaccattaccaccactgtcttgtaactaaggaaacagaagcctgagagctccaggccctgcccaggtcacactgctggtgcacggaggatagtccacctcaagtgtcccaggacgtcctccccaccctcttacatggatgacccaggaaagatcatgtgctaattcacaaacactacttctgtgtagacactggcatgatggtgctaaagcctttgcagtgtcagtctcctaactggcacttgtctacagcgcctgggaccccataatcatagccatgctctcagcaccagtgtgggggtgggtctgtcatcatccccgcccccagcatctgtttaccggactcaggtaatgactcagaataaaactggtaatggagaacgggtcgaagtcttccctgaaggatagtggagaattaaaatggacaggaaaggcagagacaactccccatggagatatgctggcagagtgggagctggccgcacacgcccctcctcacctcggggcgaggctggcttcctgccctggctctttttcctcagcgagtcctcctgctctcttagtctttgaaataatcatctgtagcagtcacctcccttaagttcgctgtgcctaataagcaggtgctttcttcaactaaagaaaacaggcgcctgactgcaagctaaaacacatggcagcgcgcgcgtgtgtgctgaaagcgctcggtcctgtcaagagcatgtacttccgggtcacaactgtgcttccgggtcacagctggcgtgatttcagtgagactgcgtccattcacttccttggctaggcatcctaaatatcggacttctgtcactgtgcaacaccttgagctggcggtgttttacccccgcctccccagcttcatctcccactactgtcgctcacccactgacccttcagtgatgtttcctcctccctatgggctcgtctaaagtaggtcgtgttctgcgcatgtgcccttcctgttatttgcaatgaaatacgtattggttcccctctaccagatcataataaacccttcgaagttagagcgtgtcacctcctgttacctgcccagtcctcaagctggtgcttaatgtatagttatcgaggtggtggtagtggtggtggtggtggtggtggtggtggtggtggtggtggtgatggtggtggtggtggtggtggtggtggtggtgatacaaaatgcacagcataaaaactatccaggcttaaaccatgttcctaatatcctgaatccaagagtctcttttcattttagttctccctctggatcaagttagaatgccctgttttagcctaacttctaaagccacatgccttttggagtttttgagagatgtgtacatcagcccacagaagagatagatgcatccttgagaagagacttgccattatttatatcctggttccgggtgcctcgccctgacttgtcagtggcacagctaaatgtcaactgtgtactaactagcctcacgcccgcctacggattgttattcacactggttctctctgcgcgatttgaacatagccttccatgctgggtgcttagtcactgggtgcccgtgggaggcagcaagattccggtgaggggcaaagggctgccggtgtcgtttccttaatgtagggcttgtcttttttttaatttattttttacttttttaaagcaccctggttccacggacaagtgatatggcttctgtcccctagtttcagatgatctctggcccccacattatttatagggggctcaattgtcatctccccttgacttcagtgaccccctggcagcttggaagtaggcttcaaatgcatccctgggaagtgaaatgtgaattatatcttggtcctttttcaagactaccccattagcgcagagagacattgacattgacggagcaggccatccttgtgagggattttaattgcttctaattataggattatcatttaagcacaagattaattaccatgaaattattgctgggaacttgatcttctacaaagtcaacacactggccaggcaaggcctctcttagacgcttgcaaacactgtctttcaaatcacttccactgagacttcctttagccctttgatgggggggcgactataaggaaggtggagatgaggaagaaataagtaatagatgaatggcccaaagaaaactggagaggcatctagaaatcatgggcttcaacaatggaatgtcccaaaataaatgcagagttatcgttgttgatcgctatcatcctcaagggtggtccaaccagaagcgtggatgagcagattttatcttacgatcttccccaacgctaagtgctctgccccattaaaaccatcctttcctgtgctttatcaaggctcccccggttaatgtgtgtgttcacgctctgcttactggcaccagactggcagggaggcatcaggctgtgttcatctcagcttctaggcatttccacttggaaagatgcagatttccagaaagaaaaagaaaaactacaagataagttctttagctcctggggtggtcctaaaatatcctggtttaaatagagtgggctgtagccagctgcaggaagctcggcagcacagcacccccacaggggcctttctacctcccattttcctttgtaatcaatgcaaggtttgtggttaattaaagacagtcagggtcccttttaaactaaggcaggcatttcatcccgagaataatgaagaaggaacagaaggaggacttgtaaaagttttcacagaaggttgctgcgtctggaggttaccggaggagaaggtgtcctttcaccagcttagacccacaagacgcaggagttgtgtcgggcatgcctgtttaggataaccctaaaccccatttcatcctgcccccaagccccaaatcacaggggccttaaaccccaaaatcctggcttctgaaagatggtaatacacattaaacaaatcttccacatcctttaaatgactaatgttctatgaagcaagcatacagggagctatgcctgagtaacagtggcagtggccagctttagatgatattgtggcattggctttgggggccaaataaattggatatggctcccaaaatgccactaagtgctgttgaataaatatccaaggtcgtacctctatatattttcgttcaattatgtgagtagctgtgcacatgtgtgtgtttgcccatgaggacagacaggtatgtgtgtaaaaggaagagatcatgtcaggtgtcgttcctcaagtaaggtccaccttattttttgagatggaactttcactggcctggggcttgccaagtaggctaagctagccaaccagcctggggatcctcctgcctcagcctccccagcactgggattacaagtaagatgtgtataaccccagtatacttagctttcttacacgggctccggggctggaaatcaggtcttcatgcttgcacagcgagcactttacagactgagctttctcctccgagccgcgtttgttattctacgtaacagtgagtttcaccccgtcgtgttgaatcctgcagtccaacagatcgatatgcatcgcttcatggacaccttaacactttgagtcctgactctctcattgtgtaactataactgcagtgggacacaaccacaacaagggaaatcttgttgtgggtttcctcggcttccctacacccacaggcaagatgtaggaacactttcaaacttagaagcatcctgcaggaaaggaacaagctcagggtggttaagagtatcactttcatggatcttgcctggctgtgagcgttggtcttagcgcttcacctccctgtttccctgccttcatctgcaaagttgtagcaaggcaccagaactgtggttttgaggttcctgttagacctggcactgtgttgctatgagagctattttggaaataaagagccaaccatcaccgcgagtcattgtgcccctcttaaggagacagcaagaaagttggagacgccatgacctctgcagccaggaagcaggcaaggcttgggagccagtgattttcaagtgagttgtaacagctagtgcctcatgggggatgccagaaggcctatctagagcctggggcaggtttagtttcttttctcattgcggtggacaaataacctgacaaaaagcagcctaggagaggaagtctccgtggtcgttcagaataatactgccggtctcggccggggaaggcatggccatgcaggtgctcggaagcagagaaattggagtgcgggtgatgagcgggctttctctgtttcccatgggtcttcctggagtgtttggacacacccagacccaagctccactaatgcactaggtgcctcttgttccaaacaagctgataattgctatttaagagcccctgtgtagcagagaaagtgggaaaggcagttgcaggagtgaagacagcctatagattggaggaaatccttgttcaccatgaatctgataagggatccagggggaaaaaagaaaaaacaaagaattgaaagaactaaacaataagaaatcaaatgagtcaataaacaacagaccactctcaaaagatggaaaacaaacggccaataaatagtttttattggctcagttttcctatctgctcagagaaatgcaaaggaaagccacagtgagagttcattttagcccagtgggaatagcagtatgaggaaaacagattagggtgcgctgggggcgggaccacaggaaccttgcgggtgggaacataacctagtgtagctgctgtggaaatcaggatggaggtgcctcaaaaacctaaagcagaccttccacatggcccatctctattgcccctgggaaggtgctcaaagggctccaggtctgtatgtcccagagctgcttgctcgccagtgtctgctgcactgttctaagcaagcagctgagttatgaaaccaacctcagtgaccaacagcagagaagttgacagagggcagtgcatatgcaaactggaatctttttccagcagggggggaaaaaaagacattatatcatatgaaggaaagtggatacagccagaggcaattatattaagtgaattaagctgatttcagaaagaaaaatatcatatattatctcccatttgtggttcctagatcttatgtagacagatgagactgtgtttgcacgtatgacaggaacacgaaagcaaaactttctaaggaggctaatggggtgcggggcgggaggagtgaggcaaagcaagggagcacggagggagcaagcacaacgtgtacacttgcacaaggcataaaaacacatttagaaaaagaaaaatagaccatcacacactcctttctacattttgctatatgttcaccccaacacacacgcacacgcacatgcacaccccacatagcaagccaggcttcttcagttcagaaagcttggcctagattgtgtatcattggctctttctggtttcttgacttctctgtaaacgatgactatgatcatagcagaaagaagaggctagacaggagagggagcgttctcctgaatgaaaaagagagagatcttaaacagactagccaatgtgtaaagcaggactcccagaagacatgcctgagctgtatgggaagtaagtttgggagcccgacccctgccatctctgtgggtcccattctctttacccgtgttcatacctgcaacttgataatgtctgaccttgagcacaagagtttgacatgactccttcatgcctcctgaacaagcagacctgctcctggcctggctcgggaacacccaaggagaaagcaaaacttgatttagcaacatttgtctagctcaactgcccccttgttaattgcccctcttatctaaagtctataaaatagccctccccgtgaagcatgaactatagaagaggttgggctaatggtgtatctgcgggaaccagaggcctttgaatggggtcccagtcagatttggagcaaaaaagagttggctgattagagccaggtactagacaaagctctccatgcaacgttttgagccgttggcctccaatgactctccactgtagcagctttgtctgagggctgtgtggcttgcttggcagccccatgcctcacacccccagaaccctgctttcacaggggattccagctgtgagaatgaactagttagcaacgtgctaacaatgcctctgagttcttagcctctgtcccgaggaaaaccagtctacacgacttccattcagcaagagaaagaaaagcaaggtacatttatccgtgaatcactgctgcaaggccctcccatggttaggaaaataactttgtctcctgcatggtttgaaagctgcaggcccaatgggcaaagggtcagggcctctctccaacttatcaactcaggagtgcagaggtggatggggcccacttttaagtacctgggagtctgaattctatacatggcccctcatttgtggattcgagaatgctgtctttcttcttgtttgatccaggtccccccatttgacagtttaccactgcagtgattattatagcacacagcagatgacaagcagctggagaaatgacggtttggaggtaaatcaccaccttggtcatttctgtagaatcaaagctttgtacccaaagactgggaagatggctcagtgagtaaagtgcccgccatgcaaacatgagggcctgagtttggatccccaacacccatagggaaagccagatatggtgttccaaaactgtaatccctgtgtgtgtgtgtgtgtgtgtgtgtgtgtgtgtgtgtgtgtgtgtttcgaagaggggagtggtgagacaagaggagaactcttctcaaaatataagacaaagaatgatgagaagacacctgctgttgacctctgacctctggcccctacataggcatgcccaggcttttgtgtgtacatgctgacacatgagcgtgagcacacacatacagttttacctccaaacttcttctcagccctaagcatttcccctccttctcagtattacctttcattggagttgatgaacgtagctgccatgttctaaggcattggcagataagccctgtcagggagcgagagcacacacacgtaagaggatcgtccaggatgtttttttccaactggattgaggcaatagagactttgccagtgaaggcctcttagccctgacattgtctatttgtcatttatgttcagttttgtggtcacaggttaatgatggccaaagagaacaggtacagagacgtaattctgtctctttcccccaaagatgttccagagaggagtaaggagttgtgcaatgcacccacaagttccctgtaactcctcatgactatgttcctcagatggctacctgcaagtgaccttgcacatggagttcttggtgctgtgactggtgaaggtagccacggagagggcagttagttatgtctgcccatgtacatgagaggccctacacgctttatagatgtgtaacaccaacaactagtgagttaatccaggaatacgttggcttgggcagagcatgcccagaaaaaagcccatcagaagtggaactcatagggcaaaccagcaaagaggggcctttgcagcttaccagcctgaaaggtacccctttttgctctgcactggggtaatgggggaagattccctttagtaacatttccccttaagcaggcagcttcttcaggttggagctgggggagaaccagtaagcattttgtctttctctgccacgtgcatcaaatgcttatgattttattagcaactgcctaggagccaggaccgatttaatttaatttaatctcctaggttatttcggtttggtgtggtctatttttagcacagatgaaggggaagtaatcagaccggagggtggatgtggattcgggaggggcttccgctccctggatggttactcggctcaatccatcttgactgagaggagaggactccacagaggggggcaggtcggccaaccaagttcctgttctcactgagtctcactgttgatggcctcgtcctctccagctttaggaaagatggcgaggagaccagtcacacaacagagagcctttttctctgggacctgagaaccaaataaagccaccctccattctcctttagcactggccatcgtggtactgggtagcattccagtctttactacagtggcgtgcttctgctctctgtttgtagttttactggtctagggtttgaaacataggaggtaagtttctccctagttttgggtagacgttgcctgagtgctgatgttgttcggagtctcctataatgagaccgagggccctaaaatcaccagagtcttgaggtctggagatgccaccccagcctcagcacaagagcagaatcccagaccaccgcaacatcactcgctgtccccaggagggaccaaaatgctgtgctaatgaggctagcaatgatcaagaacaagggcgatttgtggtccagttggagacagattccaaaggtaatgggaatgccctgctatgatggaggaagataagaggccgtgctgagactctgtcagtgctgatgtcgttggagacaatcgcactgtggacaagggtgtcatccagttttacacaccagctcctgagggggaaagttgtattcccattgaagcattagtactgtgcaaacctcaccgactttggaatccttaagcttaaagtggtgtctggcacctggtaagtgtgcaaagtgtgttcacatagtgacctcagatggtgtcaataatattaataacaaagtcaagagccattaaataaatgtttattttgtggcaagaagcatgtcaagttggtttcttttcttttgcataagttcacttgatacttaagatgtcctgttgagtgagacacccattttctttatgttacccgtgaggaaatggaggcttaggtgatctgaggaagtttccaaggtgtggatgtggagccagaggttgatttcaagagggacatttctattctgtgctctgagggtttccatgagaacggagctgaaggttctgggtcacctgcgagactgtgggctcagcgctatggagcagaagcactatgagaaggagctggtggtgggttgtgtgagtaggaatggcaaggaggagatcaggtgacgcaagcaggcttcatcagagtcagtcagtcctttaaacctgctgggtgtcccctcctagctgggtcgcccaccacatcttctaccctgtgatcaaatgagatcgcagtcacacacaccccaggcgccttgagtcacattctctaaggccaagggaaagcttacaaacctgtgcagctagtgagtgctcccccatgattctgaggctaggtgacatcacagcaccacaggacaggttgttacctgtcccagccttgtaatcggttaagtcgaaagataataatgcaacaagctaccacgtttagaaggacgacagggaggttactaaagctagggctcgctctactactcaaaacagatcaggaggcagtggcctctgcaggcaggagagggtacagcatgtcttcccagggttcgtccactctgttaccttccaggaaaggctaggtccctggagaacaagtccagtgtcatcttgaatggatgatttagcaagatgccagtttattgatttatagaaaaaaaaatagaattatctgttacttgttgataatctgagcagtttctctgtggccaggatcctggagagagtaattacaatggactcaatttattgtcttgccatttaaaatgctgacctataggctacataatatccacccacgtagaccttgtctcccccatgacagaccccagggaactcagaacactgcctggtgaacacaagattgtacaaggttagacaaatgttcagtggcatcaggctaggcttgctgccttgcatcaagatagagacttctatatgcctgtttaaaagcactcaattaaatgcccggcacttccctgtgggccagtctcaggcactaatggtgtttgccttggagcctcttcttatttgaatatatttatgccaggaacaggctggtcttgaaagccttttgggacccttggtctccttcaaggaactcttcaaaagttacacgttggatatgtagtccccaaagtcatgtgttaatggtgtttgaaatgtggggccttggggagttcactgggccagaggtgccctttactacagaggtttgcttaactcaaggaccaaaatccccacttccatataacctacaagtagattttaactcataaaggcaaaacaaaagggctgactttaacagattacatctgtaggtgacaacctctgtggcagtgtaattctgggagagtaatggccaaaccttagtaacaaaatcagagattacctggtatatgagtgtggataccaagcctgatgcagcttccctcgtttgagggcgagcagagaaagaaaacatacacataacagatgacccattgatagtgcatgagttacaaggctgagggggagctagctcagtagtcatgagtgtcgactgctccccagtggtcctgagctctcttcccagcgtctgccccagggaatctgatgtcctcctctgacccctgtgggcacctgcatacacgtgacatatactcacacaaaagcacaaacgtgaatttaaaaataacttcttaaataaaattaatctgaactatctatagtaggggtgataaagagaagagaccagcagagcacacaaggcagtgaattgctgaaagaatatgcctatcaaaatgtatttgaacatttccacataaattttagtagaaaacaagaatatgccatctctgtaaaacaaggtcattgagctgtttgaataaaaaggtagatatagaaagaaagcagacacaaacggttttttgttcttgtctgattgttgaatgatgaattgttgcatgaggaggcagacgagatgaaggaaggcagataaattcaaatgttggcaaagaaacatagattgcagccctggcagcaaaagtcccaagagaaagtataggaaaaccatcagagctgccagagaaacggggggatgcaggcaatgcgaggaaactatggcgatgggtgccacggaaggcaaaaagcagaacaagatggaggaccatcgcgaataatcgcttcgtcctggggtaaaggaggagaactgaacagaaagcagccatggtacctgatacatgtacgaagcagtcaaaataaaagcatgtactctgccataggaagaccaatagaggaaatgtgcaaccagggaactcggaacactgagtggttataaagaagggaaacaaacacctctccctcagaatcatgggagctacaagagaaaagctggcttggctgaaggcaccccaaagagggcagcaagatgaagtcaatgaagagcccagcatggcggaaatcaaatcatatagagttataacatgattagagatcgcagactccaggtaatttaataggcacaggaccagagattagtatagaaggtagcaccaatttagaacacagcatgatagattcttcttgatcatgggggtgtgggggttatcggaagacaccgtctcataccttgtttttataatcagagaaaggctgagtaagaatgtttgacatgggtctctaaggcgagcagtagaatacacacgtcatttatattttctaccattatgggaatgataaatgcaaacgaagcagagtgtagccaaagactaaaaaatatagaaccaaggaggcagaggggtgacggcatttgcaaagaagcagccattgagtggggactttcaagagcgtgctggactgttgcagcggaggtgattcagtccataaagtgctaactgtgcaagcgtgaggacttgagttctggccctccgcacccacttaacgagcctggcacaacgaacgactcactcctgttagcccagcactggggacgcagagacgtgtgggtagggggtagccaatcagctgggtcaacagagacatgtgggtaggagatagccaatcagccgggtcaaatcagtgagcccagcttcagtgagagactgtctccaaaactaaagagaaaagcagtgtcctgagccaaagaaaaaggagaacgtgagccgcaccgcatttatctccctctgcttcctggatgcagataccatgtggccagctgcctctggctctgcctccaagacttcaccaccgtgatggactgtaccctaaaccaatgagcaaaagtaaatgctctggtcaggaattttgtcacagcaatgaagagttgcaaccaacacagatccatgagtacagaagtgcagagatttttcgacagtggacagagagctgctctgagaagcacagtgtgggacatgtggatggttctaaaataccttggaaacttgaaacagtttagaatgttggctgctgcagggactaacagggaattgaatgtgataaagcagataccctgaaattggagcctgcttataaataaacagaggcttccaggactagagagaaggtgtggttcattccacagacgttgttgggaaaattgtctaaacgtttggaagaaaaataaataaataaatgagatctcccctcgtgctttacaccaaaataaatttcaagtgcatctggaagttaattattaaaaaaaggaaacaaaataatgaaagaaaacacaggcgaatacttaactaccttcacggagggcaaggatttcctaagcctaaaagaaatggaagaaaggaaagaaaacatgttggtagctttgactgtgtgaaaagatagactcctttgtgtttctagaagcctacggaattaaatctaaacacagagcgtggcaaacagggagaaggaccactgtcatgtgcatccaaacattccctctagccagtaagaaacctgtttactaccctaaaggaattgagaattaagtcagagaaaaagaaattcacatggcccaatagctataaagactgttaagcctcaaaaaaaaaaaaaatcaaacttacaatgttactctttatttttctcactttatctttaatatgatttttggtaggactttgatacaactttggggggagcagtttggcaagggtttttatatcttttactctccttctaagaatgcagcccaagaagaaaagcagaaatttatgtatgaagacaatcagttgttatatacaaagatgaggaatttttaaaccatgtaaatgtacaaactgaacttattttaaagtctttgctacaaaatagaatgctgggcattaaaaaatgctttttaaaaattactttggtaacttttattaagaaggaatttttaactaccataaagttatgtgaattctataaaaataaatattacaggctagagatatggctcaatgataatgtgcttacctagcatatacaagaccctgggctttatccccaacattataatcaaacaatcaatattatactatagatgtctttacaggagagcaattgtcaatcagcataacagtatgtcagcatcaatcctctgttttggtggaagtgcaattgcctttaatctttgcctttatactttgtgcatttaaattattttatgatgactatgcattgtccctacaatgagaagtaattatttcttaaaatcaatgcctccctatgtttatatgcagatcttatctgtctcccacaactagcaaatatttttcacagtcatctactttggaattatagaatattagcagataacatacgtgttattggagtacttagtgtatgcaagaggaggctatattaaaagggaaacagggctatacagtaagactatgtctcaaagttgaagaaaggagacagagtaggacgaaaggagaagagaggggaagagagagagggggggaggggaagagaggggggaaagnnnnnnnnnnnnnnnnnnnnnnnnnnnnnnnnnnnnnnnnnnnnnnnnnnnnnnnnnnnnnnnnnnnnnnnnnnnnnnnnnnnnnnnnnnnnnnnnnnnnnnnnnnnnnnnnnnnnnnnnnnnnnnnnnnnnnnnnnnnnnnnnnnnnnnnnnnnnnnnnnnnnnnnnnnnnnnnnnnnnnnnnnnnnnnnnnnnnnnnnnnnnnnnnnnnnnnnnnnnnnnnnnnnnnnnnnnnnnnnnnnnnnnnnnnnnnnnnnnnnnnnnnnnnnnnnnnnnnnnnnnnnnnnnnnnnnnnnnnnnnnnnnnnnnnnnnnnnnnnnnnnnnnnnnnnnnnnnnnnnnnnnnnnnnnnnnnnnnnnnnnnnnnnnnnnnnnnnnnnnnnnnnnnnnnnnnnnnnnnnnnnnnnnnnnnnnnnnnnnnnnnnnnnnnnnnnnnnnnnnnnnnnnnnnnnnnnnnnnnnnnnnnnnnnnnnnnnnnnnnnnnnnnnnnnnnnnnnnnnnnnnnnnnnnnnnnnnnnnnnnnnnnnnnnnnnnnnnnnnnnnnnnnnnnnnnnnnnnnnnnnnnnnnnnnnnnnnnnnnnnnnnnnnnnnnnnnnnnnnnnnnnnnnnnnnnnnnnnnnnnnnnnnnnnnnnnnnnnnnnnnnnnnnnnnnnnnnnnnnnnnnnnnnnnnnnnnnnnnnnnnnnnnnnnnnnnnnnnnnnnnnnnnnnnnnnnnnnnnnnnnnnnnnnnnnnnnnnnnnnnnnnnnnnnnnnnnnnnnnnnnnnnnnnnnnnnnnnnnnnnnnnnnnnnnnnnnnnnnnnnnnnnnnnnnnnnnnnnnnnnnnnnnnnnnnnnnnnnnnnnnnnnnnnnnnnnnnnnnnnnnnnnnnnnnnnnnnnnnnnnnnnnnnnnnnnnnnnnnnnnnnnnnnnnnnnnnnnnnnnnnnnnnnnnnnnnnnnnnnnnnnnnnnnnnnnnnnnnnnnnnnnnnnnnnnnnnnnnnnnnnnnnnnnnnnnnnnnnnnnnnnnnnnnnnnnnnnnnnnnnnnnnnnnnnnnnnnnnnnnnnnnnnnnnnnnnnnnnnnnnnnnnnnnnnnnnnnnnnnnnnnnnnnnnnnnnnnnnnnnnnnnnnnnnnnnnnnnnnnnnnnnnnnnnnnnnnnnnnnnnnnnnnnnnnnnnnnnnnnnnnnnnnnnnnnnnnnnnnnnnnnnnnnnnnnnnnnnnnnnnnnnnnnnnnnnnnnnnnnnnnnnnnnnnnnnnnnnnnnnnnnnnnnnnnnnnnnnnnnnnnnnnnnnnnnnnnnnnnnnnnnnnnnnnnnnnnnnnnnnnnnnnnnnnnnnnnnnnnnnnnnnnnnnnnnnnnnnnnnnnnnnnnnnnnnnnnnnnnnnnnnnnnnnnnnnnnnnnnnnnnnnnnnnnnnnnnnnnnnnnnnnnnnnnnnnnnnnnnnnnnnnnnnnnnnnnnnnnnnnnnnnnnnnnnnnnnnnnnnnnnnnnnnnnnnnnnnnnnnnnnnnnnnnnnnnnnnnnnnnnnnnnnnnnnnnnnnnnnnnnnnnnnnnnnnnnnnnnnnnnnnnnnnnnnnnnnnnnnnnnnnnnnnnnnnnnnnnnnnnnnnnnnnnnnnnnnnnnnnnnnnnnnnnnnnnnnnnnnnnnnnnnnnnnnnnnnnnnnnnnnnnnnnnnnnnnnnnnnnnnnnnnnnnnnnnnnnnnnnnnnnnnnnnnnnnnnnnnnnnnnnnnnnnnnnnnnnnnnnnnnnnnnnnnnnnnnnnnnnnnnnnnnnnnnnnnnnnnnnnnnnnnnnnnnnnnnnnnnnnnnnnnnnnnnnnnnnnnnnnnnnnnnnnnnnnnnnnnnnnnnnnnnnnnnnnnnnnnnnnnnnnnnnnnnnnnnnnnnnnnnnnnnnnnnnnnnnnnnnnnnnnnnnnnnnnnnnnnnnnnnnnnnnnnnnnnnnnnnnnnnnnnnnnnnnnnnnnnnnnnnnnnnnnnnnnnnnnnnnnnnnnnnnnnnnnnnnnnnnnnnnnnnnnnnnnnnnnnnnnnnnnnnnnnnnnnnnnnnnnnnnnnnnnnnnnnnnnnnnnnnnnnnnnnnnnnnnnnnnnnnnnnnnnnnnnnnnnnnnnnnnnnnnnnnnnnnnnnnnnnnnnnnnnnnnnnnnnnnnnnnnnnnnnnnnnnnnnnnnnnnnnnnnnnnnnnnnnnnnnnnnnnnnnnnnnnnnnnnnnnnnnnnnnnnnnnnnnnnnnnnnnnnnnnnnnnnnnnnnnnnnnnnnnnnnnnnnnnnnnnnnnnnnnnnnnnnnnnnnnnnnnnnnnnnnnnnnnnnnnnnnnnnnnnnnnnnnnnnnnnnnnnnnnnnnnnnnnnnnnnnnnnnnnnnnnnnnnnnnnnnnnnnnnnnnnnnnnnnnnnnnnnnnnnnnnnnnnnnnnnnnnnnnnnnnnnnnnnnnnnnnnnnnnnnnnnnnnnnnnnnnnnnnnnnnnnnnnnnnnnnnnnnnnnnnnnnnnnnnnnnnnnnnnnnnnnnnnnnnnnnnnnnnnnnnnnnnnnnnnnnnnnnnnnnnnnnnnnnnnnnnnnnnnnnnnnnnnnnnnnnnnnnnnnnnnnnnnnnnnnnnnnnnnnnnnnnnnnnnnnnnnnnnnnnnnnnnnnnnnnnnnnnnnnnnnnnnnnnnnnnnnnnnnnnnnnnnnnnnnnnnnnnnnnnnnnnnnnnnnnnnnnnnnnnnnnnnnnnnnnnnnnnnnnnnnnnnnnnnnnnnnnnnnnnnnnnnnnnnnnnnnnnnnnnnnnnnnnnnnnnnnnnnnnnnnnnnnnnnnnnnnnnnnnnnnnnnnnnnnnnnnnnnnnnnnnnnnnnnnnnnnnnnnnnnnnnnnnnnnnnnnnnnnnnnnnnnnnnnnnagtctcagtgctgggatgggggtggaggtggggttgatacaatcggatccctgggactcactggccagccagcctagcttattttgtgagctccaggccaatgagaaaccctgtctcaagatggcagggtttatggcatgtaaggaccaacagccaaggctgtcctctacactctgcacacacacacacacacacacacacagagagagagagagagagagagagagagagagagagagagagagagagagagagaaggagagcgtctcagggagttttagggtgccttactactttaagttagagcctgcgtacctcagggattgtagcctgagaacttcctatgtgtaccaactggaacctgctagatgctttcctctgctggagtttgctgtgcacacctgatggcctgtagctttgtggttggttccgccacagggtcccactatcgtgtgtccaccaccacctctgacacaccccagttgcatcacggctcagcctctctgcactgtttgagagtcagaatccctgaaccaggagccttgccttattgctagacagctggaccacccccaaagcatcacatgggaagggcattcagcaaatcccgttccggaagcaatctgtcaccccggccggtttccccgtcagcatttgcggggagttctgtctcctggcagggaactggctcacagctccgtgctggaactggcagcccctcagagacagtttctccttctcagcatcacccgatgacgcccagagtcaaggcgcaaacgagcctcaagaacagcatgttcttcccagcaacatgccggggaaagctgggcttggagaaagctgagcgctctgtggtgtcctggagcccacgatgtgtgccaagcttgctgtccagccctttccctcccgatcccatccgtggcccaggtgggatgcctttgaacctcttactcagttatgtaaacacacctgatttactacctgattgcacagattattgtcagcttttgcctcccagtgctcctgggcacatgctccctaaaagtcccagtttctggagtgccttacagtataaagaatgagcccattggtgcctagtcttgcttactgcttgcttaatggttcctagggggagctgaagtgtgggcgtgggtattgcagggagatttgccctgtggaaacaggtcgtggccaggtcaggtgctttgaggaggagactttgtcctagagaaggaaaacagaaacaagcacaaaagcacatgagagcatggggctgtgcatatctccgccttatttttgagtcagggtctctcactgtcttgtagctcaccagttggctagaccggctggccagaaagcaccaggaatcctcctgtctctatctccctccatgtttatgatacaagcacatgtatctttctctagtatctttcatccagacattgcttttctatggggaacccatctttccaagagtgacctctctgctctcaacaccactggatactcttaatccatgtcttggtgaaaccagggtctttcttaattcaaaccctgagctgttagttctgaggcagacactatagagaccacttgtatcctgaacaccctatcagtttggcaattgaaccccagaagccactagggtcacaactctaagtcaggtactagagtcccctttgccaacttcaaggcatcaggcaaacatgcggtctataccctttcccctccatccaggtacagccctggattgaccctggtcctgttgtgtgttcacttggccctctgtgctctgaccactgtcacccacctcccaaacgaagggtatttggtctcatctcttacccctcacctcaccttagctggggccaatttcaccacctcttctctgggactatgtctactctgagacaagtgatgcttgggtgggatctataagattacaggcttgtcctggcttggccactcataatctttatgtagtgggcttgttattcagcctcttgcccacccttgggtcccactagcacagctcctggctattgtaatgaactcaaaacaatggcaatcacttagtgacctctcccaaaatgttgctacccaccattaccaccatgatatttattatcttcttggacaccagagaaccaaggaccttcattcaccctcgatctcagaaccacatggctcattgaacatgctcggtggagaagtgctctctctctctctctcctcactcttctctttcctgattccctttctcccatccccctcttcctcctcttcttacacacagctctgcataagctctgaaatcccatctagtttctctggtattaaatttatattcaaatttgatcatactttcacaagatatcaatttgtaggtccacaactacaaagaatagtctggtcgtcattggaatggctaatttcctcagtgtctcctttgttacaaagacatggtgcatggacttggcagttacctccatcttctcacctgttgtcacatgaccccaggctctgtgggccttggatactagacctcaccattttctgtgttcatctgcccactcccaccctctgcaatcttgaatttctatcttttgccattggtcacctcaagcaaaaaaaccttgctgttgtttttctgctgtgtcagagaacatgacttttgcttacacatagtgacgagtgggttataaaattcgtttactcttgttttcaactgttgggcagagatggatgtgggaggccaccgccaggtcagctcaaagagaacaatcctggcttttacagtgagcccatggcttgagcctttgtcctttctgttggcttgtaagcagaagccacgaacaagggtgctctcagaagggaaaaagcagcaaaaatagagaattattttccaaagcaaaacagatcatttaaagggctgacttgtcattgaacttggaggcagttgatttttgggcatagtcaaacaatgtccctctgtagctctgaaccctgaatgggcagggttactgcaggtcagtgctgacacatccaggctgcaggcaagaagatgcagctgtgtgctccacaaagcctctggtttgtgtgtgtgtggatggatctgccggagcctctgtgtgctcctcttctgacctgttcccagccatggcgcctcctggcaaccggggagagagtttgaaatccacagggataccaggagatggaataggtggggcatgctgggtacattctgtggtgttggcctgtatctagcctccatattagctatgtattcatgagtgttggtttcatcatttgtacttcataattcatactacacagtctctgaactaagaggccatctgcaacattttctgctggattaagaattgcattgattttttttttaatctcacattattttggaacacttgggagctgagtattccagctttaccctgtggtctggaaattccaggcctgtatgtctgtctctttattatacttaggtagggagggatatacatacctatgcatgtgtgtacctgtgtgtacatgtatatgcagagtctggaggtcaactttgggtgtcattccagcggttgcatcctatttgagataaaccctcttgttggtctgagactgtgtaggctggactggcaagacgtacgtatcctcctgtctctccatccgttgcactgagttgtaagcatgtctcaccatgcgtcatatggattctggaggaaccagtcttggggccttcatcctttcactcctggcttcctgggctgggctgggttgggtggtgctggtggcaacagtagccttggtgactgtgattcagacgcaaacgctgacttaccgtcagcactcctggtagtaacagcagcagtgtgaagctgtgtaccactgtcacttgtccaggtgttctttgtacattttacatgtatccaagcctttagttctcatagtcaccctgtgtgatcggcagcaaagctgtctctactctacaaataaattgtctgccatattggaaagcgtgtctgaagccaaaaagctaatggtggcaggcaaatgtttaaccccagcacagggtctcagtcacaggtccatgggaagccaaacacatccatggcggccactcaagcagcttgtagctgatcaatccctaagcattcctcaatgttcattaaacccccataaggactcatatctggaggaacaccgtacttatatcagagaaagcctagtgatgtcaccactaccagtttgccccagtccttgcctctacttccctccatcgggacctgggcaacatcattggcctgtggctgaggctattgctccattcatttgtctggggcactgtcttaatttcttttcctggtagtatgataacatattctgacaaaagccacttaaggaaaaaggatttctattagctcacagttcaagggataatccgacctgataggaagtcaagacaacagagcttgaaccaggtgcccagtttcctttctttgttcacacagtaaagggctccagtcaggtgactgtgacacccacaggtcttcccatctcaattaacataatgaagataatcgcataggcatgcccagaagcccatctctcagatgattctagactctgtcaactcaaagattaacattagtcatcatagacgctcaaggctctgactcccatctgacatggctacctggtcctccagtctgatgggctctcctaactcctaaatactgacgtaaaacacgcatgttctgggcacacatagccacctggagcaggtagttcacatgggtgcctctcagtcaacaaaaacatatttgaaatgctttatctggaaattatatcttacattatccagaaatggtataacctctgtcccatgctggtttttctcagtgttgggcttgacagcctatagttccagaacggtcacctcaaaggcaaaagtatgaatacgattaatattttgcttttctactaaagtcctggagtgacagaatacactttctgttctaaaatggtcaaaagaccacagcacagatgtgtttcttctcttaatggctataaaactgttaatgagctttggagacaggtttttttacatggttcctcgacaggctttgggccctgtgcagaccctacggtgtgtcgttagtcattttgcaggttatgcacagaggagaggtgtgattgcactgtaggtatggggactgcctttgggaagtgatttagcatgacaggccttgggtggagggttttttgtgcattgggaggtcagaggtcaacaggtccccatggagatcagaggagtgagatctccctagagccggaggtatagatggctgtgagtggcctgctgtccgttctggtaattgccatgtctagcttttcaatgggtgttggggattgaactcagttctttgtgctagtatagcacgcactctactggctaagccatccccacagctctcaggacagacttccttaagttgaaccaggtagtagttcacacctttaatcttagcactcaaagacagagacaggcagatctctgtaagttcaaggtcagcctagtccatgcagtgagttctagaccagtcagatgggcatagtgaggccctaaccctgtctcaaaaacaagcaaacaacatacagaaaagaatcaagaaacttcatcccctgtagttaattaccaaagtagcatgacttgctagttttctgttttaattctgtgggtcaaaacaatctggttctggcagagggttaaggcaaagaaggaaccgtgcatggggtatttgctgagactgtccttcaacctgtcactcgggctgcggaatgttctacatccctcacatctgcagagtgaaattccttcccactgtgttttcaaagtgtccagcagggaacactgaggacacagactgatggcggcacttgaggaccactgggggcacagactgatggtggcacttgtaatggtttctgcaggttctgagctggcattaaacacgttaagttacatgatgaggaagctagtctgtctccatttcctctgatctccactgtaatgcagaggggggctgaacagccttagcatgccaacacttagttttctctgtatagccaagagaatgcaggccacaccaccaccaccaccactgtgtctggctagaaacacacggcacagattttcattgcactctaatttatgggaattatttaaagccttgggttttcactgcttataccttgagggaatgtaaagaccaatgcaggcaatgatcagcatctgcacatgatgctgaggtgctggtgagctgtgcttcggggacactcaccacagggcatcaaaccttccaactatggcttcacggtaaactgacctgggaagcctggaaaagcctagtgcctgggcctcaacccaccaagtgggtttgacatcttacccagagcctcaaatgagcatatccagaatgcatacatgggcatcctgaattccgagcagatggacccccgggttggtcccagttcacgtgtcctgcctgccatgagtaacaggacactgtttttccaaacacaataagcaattgaaatttggactcactatctgcttcagtgacatttggaattgataactctttttattttcagcctagatgataatatctcagcaggaaaccagagtattaaatcccatcaagatcccagctcatcaccattcagaaaagactggctttaagtgagtccattcactgcctgtctgtgagtggaaaatataaaagtgcctggcaggaggcaaacctggacctctccgtggccctgataagactcttcattcccttctgggatatgagcttctgcagcccccagtgtcagacactaagcattttcagatcctccccctagacttaagagagacctgtggctgctttgcattgcttgcaggagactcccatcctttatccttcctgatgctggagtctggtgtccctggggattagacccccaggactgcattaattaaaccttggattctcagtgcattcacaagtggctgagacctggaagagctctgactccgttcagattttttttcagtggttagtggagacaagtctaagataccacacctggctcaggagacattgaggagaggggctggaagataagccggagcatggatgtctgctatgagacagcggcttagagagatgagagggagatgcgcctgtggaccattagcaagacccaaacaagacctgcgtgatgacaccagttgatattctgatgtggatgggtcaactcttacaggcctcatccctagataaagagctacaggcagttaatggctcctaagagacagagagtcagtcttccctactgaagagccccatgataaataatttagtcccaagtggtcagctcttaacacattcacacaacaatttttttaaatattgaacaatatagccggatggtggtgcacaccttaagtcccaacacttgggaggtagaggcaggtggatctctatgagtcacaagccagtctagtctatagagtgagttccagaacagccaactacacagagaaatcctgactcaaaaaacaaaaaaaaaaaaaaaccaaaacaaatctgagatacagtgaacattcatacaatgcaatctcccttctttacaagtttcctggctgtattacatactttatattcattattccatttccttttccttatcaccggaattatggccctattcatttttgtagttaaagaaatgggcttgggctcaaggtcacaccgtgaagggtaaatttgatagtagagcttttggcctgcatagcctgtgctctgtcgcccctcaagctgggtggggttaaatagaatcttaaggcaggagtgtttggagaacccagctgcactatgggaaagacagccactgcttctctgggatttgcagaccttacctggcccacactttcctcagaccatttgaatgcagtatccagtcacattctgatgttaaagctgcggggtaagaaagacataaggctgtcggccagcaggaatcagcactccgtgtggtaccaaaccagtgcagacaatgcttgacttggaggtctgcttgtagtgacacgctgccacacctgtgtccaaagacccaatatctttagcatgtgtccatccatcctctctttcctgcccagcaccagctctgggaacttgtaaacttcttcggtagttcttcatcttcagtctccattgatgatatggggtagcaggccataaccctggtggtgtaaattggtttttcgatatttgcataccatggattcacctgaaggcttgacctctaagggattctgattcactacgtgatatggggacctctggattagagagcctcctaatggattagagaggtgggtgggtaccaatagtatgtgaccagttaaaggcctctgatgatatgacatttgccttgtcaggaagataggaagggagacatactgcagcaggctcagactcgtgacctttatcatcagcatagataatgatttctcgcactgagaggcagcagctttagataaccagctgcatctaagagcttgttcctcgatgagaaggaagtggctttcctttgtaattgttgattcccaagtcattgcttcttgggccagaatatacacagggatcacccatgggtcttgttaaagtgaggattcaacgtttgtcattttgaggtggggtacaacacgctgccctgggagtgaacgcctggatgatggttgatgtacattggatagaactcctaaatcccaaccttaaatatcagtggttcctagctgggtggtggtggcacacgcttttagtcccagcatttaggaggcagaggtaggcagatctctgtgagttcaaggccagcctggtctgtagtgtgagttccaggatcttttaaagactagttgttgggccatctcctttgatcattctaatttaactctgagtattgagactttagcccctttctcaagggattctaaggttcaaccaggactgggaatctgccaggttttatgaagaatgataacactttgtagacactgagtcacatgtgtagctccatgggccagggctagctggttgcccaaaaggggcaagggtcccctttccctctggaaagctagaaggtcacttaaaatttgtgttctgctgccataggtctgaagtgggtttgagcatttctatcaggacctggaatgtggttaatgctgttagtttaagctggtgctgagcctggaggctggacttccagggcccccatgatccccactaactgtcagtgaaggtagtgagaacctcatactgagcagcaggggcctctgactaaatctcttctcctctcagacagcatcttcttttcaggagaaggactgaaaccacgtctaacatagcccaagatggcctcgaacttgttaggtagccaaggttaatcttgtaccccaccttctgagtgctggaattgcaggcacgtaccactccatcgggctataatcaccatcttcaacatggtattagcaccagtgctaattcatcaagtcagtggtgggtttttttttttaatttctttttctttttctctccacagtacgagatgcaaaaaatctaatccctatggatccaaatgggctttcggatccttatgtgaagctgaaacttatccctgaccccaagaatgagagcaaacagaaaaccaaaaccatccgctccacactgaatcctcagtggaatgagtccttcacgttgtaagtgcttcttcctgccctgggatgagctctgccctcaccctcatgaaccacatactgcccacccgttggcgaaggtgggggtggctggggggtagcaaatgtctctacctgtgtcctcattcctaagaccctcccaggctactgtcaggtaacagctgccatcacttctggttgataggtagtgacttggcttaaccagaatttatgtaatgcaaaccccaagttagcatcgcctgctctgtaacaagcagatgtgttccctctcccgatgggcttcgtccttttaagagctaggcgaggatatgaagcaagaatttaatgatttttgcagcacggaataaggaactcatggtttagaaagtactattgcagcagaaataaggaaatactcaccttttaagcagggaaaatgtcacttccagaaggaggtgacatttgagcttcatctccgaggattgacagaaattccaaacccgagatgaagaaaggggaagaatagtaaggaagagtaaagtgtcagtagtgagggatcacacacagcagggagcacagcacacagcagggagcacagcacacagcagggagcacagcgcacagcagggagcacagtgcacaccaagggagcaagcacagcacataccaggggaacacagcacataccagggagcacagcacataccaaggagcacaaagagattccccatggggacatactcaggaagcgcttcctctgtgaacattaccagaagaaaaaatgtctttctgtcagagagaagccactgagctctgttcagcaaagggcagaaagtctgtgttttagacattgcgagtcatgtagtctctgctgccacagcagccatagattatatataaacaaatagccaaggatgtgttctaatgaaacttcacttttatgtttcaaagctgttctctaatacaaattttctttagataagtcagagtgagctgtcaggggtcagcgttgcttcctgatctagagagagcttttagagcagctagctaggacgcaaggctgctgtcctgttgacacaggaaggaaactggggatactattccaggcacagactgtgggcatgttggtatctcccaggctgccatgactgagatgtctgactgtattgcatatgcgtttgtctttgtagcaaattaaaaccttcagacaaagaccggcgactgtctgtagaaatctgggactgggatcggacgactcggaatgacttcatgggatccctttcctttggtgtctcagagctaatgaagatgccggccagtggatggtaaggaagccatgagacccagcatgttgccatatcccaggtggctgagagaagccaggagctatagtcccgcccccccccccccccgcacctccccacccgctgggcagtgggctctggccatggattctgtagaggcatctctccaacagcctgaccagaggctgaaggaaaagagctgctcacggcccttaccctcccttctccccctgtcctcaaaggtataaactgctcaaccaagaagagggcgaatattacaatgtgcccattccagaaggagatgaagaaggcaacatggaactcaggcagaagtttgaggtgaggactcccataaagccctgggcaggaaactgtcttccctgcatgttcggggaggacccaattcttgcgacaccactgggaagcccaaagcaattttcctgctaattcttgtttgcttcacagtagaacatgaatgtcctatgtaacctctttcatttgcaagctgttggcattctgtgtccctggtcctttggagactgaaggttggaaatggcgtagaggtgaaagcatggctggtttccacataagaaaatggtttatatatcactggggcgacggcaaggttgagagtgcacccccctttcacagagaacgcctgcatacttccaagagagactccctagagaacaacttgcctataatgagctaccactcaagtatctgggaaaaaaattttccctattgaaatttttttttactttccctatagaaagcaaaattgaacggattttcttctgtggcgtgagctccagcagacgctcctgtttagaattctctttatttttttattttctctccagacgtcatttaggcaaggcagcctcctgctctcctcctaagtgggtttgtgtgtttgccttctgtcctgggttcatctgccctcttccccttcctctctctgcttcccctcttcttcttatcctctactgcttcctatctgcctcagctcacagtgaacgttcttctctctaaacccctcaggacccccaccaccatctctgatgctttctatttctctaagtgcttagcatctggctatttgatcacattatttagtagccttcaaggtctgtataactggtaatcgtttcactgcagactataaagtagtccctggaaatctcaggaattcctaaagtaacatgcagagagagggggggggagggagagagagagagagagagagagagagagagagagagagagagagatttttagcctgatcacgttcacgttgttgccctttaaaaggaggtgtatatcagatggactgaattccaaaggatgtaaaacagaaaattgttcaaattatttccatcatcaagctgatgacatctggtgaatgtagatgtcagtggcaatacttaaggccaggctgccaggtttcctggcttctgggaacgtgagtgcttgaagtgagtcagggatacttaagatagatgacacagcgctggcataggttggtgcgatggcagggagtggtggggatgggatgggtgagccactgagcgtgaaccaagctaaaggtagcagccaggctggagacatggcttggagtccagcaattaattgcctagcactctcaaagccttgagggctatccccgttaacacagaaatagaacaataaaagagatggttcctgtttctgagggccacatggtgttggtcagcacacatggaagtccctgctgctgtgcccgcagctcctcaagagaagccaaaagtcccacctgtttatatcacgtcttccggtttcttttaatgttgacagccaattaaaacttacagttcagtgtaggtcaaactttcaagtgtactttcaactaagttaagagctttctggtgagatacagtctacaacctctcccatcaaaaactacgggagagggggctgtggcagtgactcagcagttaaggacacttgttattcttccagaggaccagagttcggttcccagtacccacatcaggcagttcacagtggcctgtatgtaactccagctctatgttatgagagctatgttatatgttatgtctatgttatataacgtctatatgttaacgtgcacacacacacatatagataaagcaaatgtaaatataaatctttaaaagctgtaggagagggctggtgaggtggctcagtggttaaaaatacttttaaccacttttccagaggtcctgagttcaattcctagcaaccacacaggggctcaccaccatctataaagcgatctgatgccctctgctggcataaaggtgtatatgcagacagagcactcagacattaacaaaaaataaaaattaaatcaaaactacagcagagacaagaaatacatgtttaaaactggaaaaatgaggttcttaagacttttaaggaagtcaaatgtaagcttgagagtcaaagttcactgtgcatggccctccctccctccctttcgccttctgttgtctgtcacttgcctggttctctgcctccactcctaccctggctaggacacagctccagactatgtcacccacccctgtgttgaatggattcttctagaaggagtttcaggacactgggtgcctctcccaggcagggcagaaacctgctgtgcttaactgactctcacaccccaagtctcaagtgtgtcattcatggtcactgtttagacccatgcgcctaggacacagccgagagaggaactttgttggggctccccaggtgtgtcactcgaagtagctctaatctgaaaccaccttattcatccagaaaaactgacccactttggtgcttcatttccatggctttctggtgagctaacttcctgtttctctgagcaatgggtccacctcctccttttaaaggccaccggttccaagttaaatatctaggtaaacatcgtgggctggagggcttggggccaaaagtgaagcatttctcctagagactgagacagtgcgttgtctgtcactatctccctgccaggagaactgggcttgacagtggaggactagcccaagccatgcagcctcagagcaggaggagacaccctcagtggtttgggtggcaggtgccacccctccgagccccacgcttagacagaacccctgtgtgaattacatcccagcctttcctttgcgcatcttttggcttaatttcctggatttcctcagatggtgtttgctcatgtgttgagcattttgccgatattacaacaggaagaagcctgtagcagatagagtcggaaagatgctgggatttcatggcaacttccaggctgtgtttaaatggaagtctctggcctaaccttagatgggtacatagttctgtgttcgtggttctgtgttcaggtctgtgttcaggtctatacctgtgaaagtggcaacccttccctcagtgcctaggggtgacaggctgacagcagtctgccctgttctcatgcattctttcaactttgagctgaacacaagctcagtgctggcttgtcacttgctgaagcccagcacaattgttagttctctcagaagccagcatgtctcgggggcctcttgcagaatctagagcagtggggtccaacctttgacaggacactgaatctgtaataccttgggcttcattcacagctgtccttggctggagtgtggcctgtgggccaagacttagacaagtttatctatccatgcttgattctgttttggtggtgtttaaacttttgaggagggggtctttttatgtagctcaaactgctcttaaactcaaggtctgcttcccaagtgctgggattatagctttggaattccatcccacccaggcaatctctgtgttctagaaggaattaacaagctgtggtttcagcctccctccccacaagacatcaaaagtcactctgtctaattaaaaaaaaaaaaaaaaaaaggaaactaaatgagcacttgcagctatatgcaccatgttactattcatcggataattagatggaattttttttcatatttaaactgttgattctaggatcttggcaaacagaatcatctgcgggtgaagcttttaggagccaaggaaaaaaatcccaggatggctggaagagcccctatgcgctctatcagggcagttcatctgcccaaagatgacacaaaacaggactgtgaccagagtgtccacagagtctctgtggccttttcatctggtccatgaatgtctttgggtagagcacacacagtccctgcgtcacaaactaaattgcatgtcttttcttttgttcagtaagtagggctccagcagtggccacaacaagcagccctaccccctgtggagcttgtgctctggacccggaggcccagagatgaagcagggaggttaccgagaagcaaatggcgcaatataacactttgcactgctttgcatgcccccagaatatatagcaaccaggactcctgacttccctcccaaacccaggtctctgttcctattgtcggctcatggtcagtgctgagaatgggaggcagtcctaaggataggttacttctggctcacaggtcttctctgtaaagggtcaaataatgtctgcaggccacacagtatctatcataatgtttactctacactgcagcatagaagcacctgtgggcaagttgtaataagtgaaagtgtgtttcaataaaactttatttataagaacaagtagcagactgcatttacccatgagccatggtttattgactttaggttcaacatgagtactctggaatcaaatcttggtcttgccagttcttaacggtataacctctcttaagtgtatggcagtaatgtcagcacttagatgaattatttttaagattaaaccagtagagaagttcttaaagcacacttactatataactgtttgtttctaacagatagccaccactgtcagtgtagtttaatgtagaaagtggttcttgcctagatatctttatttgaagttattttaaagttttgtcacaatgaatgcattttcatgttgaaattatgttccatatattgattggattctctgccatgccatctgctctattatgacagaggtaggagagacccttgtcagcctttgtcatatcttcaagggaaaaagacccttgtgtgtgtgtctttcagaccctgaatgcagatggatgtctagatacagtgtgtctgtaaaatgagttctgaaacacattgtatctataaatcaggcataatgagtctgaggttgtatcagatgagccctgatatccatgactactagaagtgaagattggatcccatactccactcagacttctcaactcagtggttttgttttgggtcctgagtaaatactcaaacgtgaacttatctgacaggtgattgacagggaccactcgccagacataaacaagagcagagccatacccagagtgacctctagcagggcatcagagagctgactaggttagcaaagcacattgtgtctctttactgccagttccttccgtgaaagcccagcgctttctgtgaataattgtgctgatcttttacagaagtcaaacataaaaattgttcatctgagaaggaaggaaacaatattttgaggccacaattttctcctcctcttcctgttcctcctcctcccccctccccctctccctctccctcctcctcctcctcctcctcctccttcttcttcttctctctctctctctctctctctctctctctctctctctctctcattggttcatttcattggttggctgtttttcccatacagggtcttttgtagcccgattggccttaaactcactgtagctgagggtgaccttgaaccccagattctcctgccactgcctttgagtactggtatatgacctagaccactgttttggctaagctgactaggcagtgagcccatatgacccacatgttcctttccattctgggcttataggtgagtgtcaccatacgtagcctttggatgaacactggggatctaggctctagtcttcatgtttgaatagtcagcactttaaccaatgagctatctctccagccccaatcttggataagttccctaaactctgacctctgtttttcttgtttatgaatgaggagagggatagcacctactgagtacatgaggattaaatcttttttgttttgttttgttttgctttgcttttgttgttgtttttttttgtttgtttgtttgtttttgtttttcgagacagggtttctctgtgtagccctggctgtcctggaattcactctgtagaccaggcctgcctctgcctcctgagtgctgggattaaaggtgtgtgccattgctatgtaagtttatacaaattcctaggatcatagtaaggcctcattccatgttagccaggcctccattcctttccctttaggtatatgactatgtgaagtggacatcgcttactaaggttaggaagtagttaacgctgatgctgcggtttggaagttctgtgtgttgtttgttttgttttgtgtgcaatggaggtacagtgagataagaggattcctgtttagagcctctcaagtttcagtcaaggtatgattgttgaaaccagaccagtgagttggtatcctagtattcacatctccttggagcctgaaatcaaactccgatgctcctgtcttggtcatgtttgcagcagaaaggttgtaaagatcgctggatcccttcactcagcagcttgttccttctgccttctttctctttgatcctggtactcaggaggctgctgaagggcactggaatgtgagcacttccctgattacaggcagtgtcccttctgagggacctgccttcgaaagctaatgctatcagacctgactccccaccataagcacctgggcccaggcacagaacagcaagccaagcccctcgtggtaaatcagattttcccagccttagactatgtggattcgtcctttataactgacttcacatccacctctcctctcacatggtcgaagaggaccaggagctcttgtgtccattggttgagtcagcccagatcaaccacatctgttcactgcttataatttcagcacggcactgaccaaatgatcacatagtcatgagtcccagaaagcaaattcctacattttcctctgattgaaaatcctctcaggctgcactgtataatttgacaggggctggtcatacgagaccttggagtatttaaaatatgtacaggcttaagctgggcataatggtgcatgcttattatcaaagcacatgggagacagaaagagaatcagaccttcctttgctatgtagtgagttcaaagccagcctagactacgtaagactacatctcaaaacaaaactaaacttatgtgtagtcagatgtaaaataagtcgttaatataaaatatgcaagctttcaaaggcatagtaacatgaaaagtgtaaaatattgtaataataactccatggctaatatatactgaagtaatatcttggatataattggttaaatatagcacatggccaaagattttaattatcataggtattttatgctataaccccatatgaacattaagcataactctaagttaatttcaactatttcttatgttgttaatgcattttctagaaacttaaaaacaacatgtatacatatgtatgtgtatttctattgtacatggcatatctagaatactcctctccgttattgaaaacagtatttgatgggccaacaagatggctcaccaggtaaaggcacttgctaccaagttggatgacccatgttcaatccctgaggcccacgtggtgggaggagagaactgactcccacaggctgctttttacctccacacttaggctacagcccacaggtgcaggcatacccatgccatatagcccactcgtcaaggtcaggcagcagccttcaatcgtgtcctctcctttctcccttgaccaaagcagggtcttttggcagctgtacaagtctggctggcttgctgggagcttctgtcttcagcttccatctccctatagttacatgctggcattgatggcacagtgtgtgtgcctcccatgtatacatgtgctctggggggctgaccttggatcatcagtctggctcagcaggtacttttgcctgctgagtcaccccacagtccctgaagaaaaatagacttacctttctgctgtcacctgtctgccaaggcagtgtcgggtcgatccaagggaggttctactgggaagatgatatagcaggttggtgctcgtcttccccagccattctggatgctgccccaggcggccacttcttcctctccccgacccagattactgagatcggcagggcccagagggtggaagcaagggacagaattttgggggccatactgccctgtggactacatgctgatacccacccacagcaccccaactgaatcacaagtaccccatacacatgcataaaaacacactgtgggtttctgtttgttttttttttttttaatgtttgtgactgttcagaaccacacaagaatctaaaccaaaagaagtcaaaatacatttgaaggttgtgaggggcttgtctatgggtgggtagtgaaggagccttctgaagcttggcatggagatgcagaagctagagggtcaccctggagacaaccccaatgcctctttccctttattctgagaaacgatttaagactctcccttactaatgagcaaattaatagaatccaatcactactgagatcagtgaagaagagatttggtggataagttgtacatggaaagagaaagcagatgtttttctcttttatttactattgccaaaattggattttctgaaagcctccattgtctttgaagactttatctaatttgcaatgttcttttccagatggggaaaaaaacagcccattggaaactctgagataaatcgtagctatttgttgatttgatcagtcctgcaatggttactatataaacctaagttctttcggatgccctttagccacaaaacagaaatttgatgtgcccccggtatggattctacttctttggtccctaaatagctacttaattactttctgaactaaatgatgttaaggggtaaaaaaaaaaaaaatctattaaaaggccatcggttgagatatattttaaggtttgtacttcagtttggttttagaagcaaagtcttaagcccaaataggatatgagttagaaattgttttcattaaatcatttgtcaatagctcttagcaatgagcaaacccagagaaagtctctgatggtcacagtccaggcttgctggtcgtcgtggaagggaggacaaagaccgcacaggagccctcagactgccatgtgttctcagtttaatttggagatagattacataattttgttgggaaacaaaaagaaatactgtccagactggcttttttactgtcctaacaaatccctgaaatagcatgaaaagccttatgttgtaggcatgactttgtgggtggatgttgcctggtgtccagcaagcataatgctagaatcactccccgacccacagtacctaggctctggtaaccacagaggtcagggtgtggatgtgtcccttcattatcagcaatgggaagagggcagagaagggcacaaacaggaacactgagagtaagccctgatgtgggtttttatggctgttttgagaactgagcagaatgaaagtgacacagtcccagggtagacccgctgctgctaaagtgcttattaccaacataaggacctgagcttagactctgacccagcacctaggggaaaagcctggcagggcgcagagcaaggctgggaagggtaactccctgggacttgctggccggtcagcctagcctaattagtgagacaggttcagccagagacccagtccccagaaatcaggtggagagcctttgtatgcatctgcacattctcacttacaaatgcaaacacacacatacaccacactcacaccacacacacacacacacacacacacacacacacacacatgtacacatacacacaaacgcacaacccgagccaggcccacaagtctagtatgagctaccactgaggatgaggccaggattcaaggctagccaggtagtcgcagtggtggagagagcactcatcctattttttactgaatcaatctacattttaataagatttccaggtactcattacatcttcagcagtgctgattgacaagacaaaacccaggggctaatggctgagcagcgaagtgtgtgtgtgtgtgggggggggttgctaatggagcaaacagggacccataccaaacttcctccctttgcatgacccatgaattaagaataattgttttgaaatgtctttttatctacaaatcaaagaactgtaatgttgtgagaaggaaaattaggtggagattaaatttccgtgtccctagagtttcttaacagggccacagtcattcctgtgagctttatctggggatgctttagatcatggaggcaacacttccagaaggagtacatggcctgaaaagcctggaatctgtgccccactgggaagggtgttaagagcatctttgtggatgggaaaggaacagccagaaggaacacagatccgtcggcataaggatgccagtctcctgtctgaaatggtgcttcttatttcctgcctcttcctcttctgctctatcccacacctttctgagcatttgtgtgtcttcacgtgtgcacacataccatgttgatccatgcatcttggtactggcttactttccccttctctaagttccaagcaaattaaatctgtgctgactttgatataattctcgagcctcttgaaattgattccattatacaaactgaaggtggcttctttgctggacatacctacctctgagggtggtcggaggccatctgccgagagccgtttggagtcagaaatcatccacttcacatgtccagagccctgtagtagctgggtaaaacctccacagatcaagaatccaatggctgtcagagatagaccaacttctttcccgtgctttctgtgattccaacaattagggactctggcggtttctagcgagttgcgtgcatctgcctggtctgtgtcaggctccactcctggaggtagagtatggagaaatggaggcaagagacctccactaccttctgttcactctctgaacaatgcccaagtgtcttagtcagggtttctattcctgcacaagcatcatgaccaagaagcaagctggggaggaaagggtttattcagcttatacttccacattgctgttcatcactgaaggaagtcaggattagaactcaagcaggtcagaaagcaggagctgatgcagaggccatggagggatggtctttactggcttgccttccctggcttgctcagcctgctctcttatagaaccaagactaccaacccagagatggttccacccacaaggggcctttcccccttgatcactaattgagaaaatgccttacagttttatctcatggaggcatttcctcaactgaagctcctttctctgtgataactccagctgtgtcaagttgacacaaaactagccagtacaccaagagccccagatggtgcagaatgcctttctccttccatgtccccgtaggtgaccagggctacaagtcctctttgtctacttgccagtgactcctgctcccaacactgaccaagctacacagctggaagtgttgccactctgatggtattgcatggtatcaacaagagcttaggactagaggggtctcaagaatccaaatggaagtgctggagatagtggctgagtgattaagagtgggtacctgtggttctttcagaaggcctgacttcagttccatcacctctgtcagatgactcaaaactgcctataactccagctcctggaaatacaacccctctggattctataagcatcagcactcatgtataggtacccccccatacaatcatagacatacagacataataataaaatagacttttaggtcaggcatggtagtgcacatttccaatccctcatttccaagcactcagaagaagcagacagtgttcttgagtttgaggccagcctgttctatgtaatcagttataggctggccagaggaatatagtgagattttttatctaaaaaaaattttttttaagaattcaaaatggcagttccccaaatgaggtttgatggcttgttcctgggatcctcatgggtatttgggggctcttgcttattttcatgaatacaatcttcttatcctttgagagcattgctgtgatatataagtgatggtgacatttcccaaactacataggccagaagagtgtcagagctcgggaacctggtgcattcagtggctcccatgtcttttgctcttaacacagaggcagcagcacagcttccagcattcaccatcttgacatctgcctggatgtccagatgcacagctgcaggtcagactgtgtccctagagcccttgagggtgcgaaggaaggagtgctggagctccaggctgacacttcccgtgttttccagaataataattcagggtagtttagtatggccaagtattatcaagccttgggcctattggtagacctatttgagttcaagggtaactgcccagtggcttgtggaagattctgggattgtaacacatttgtactgaggtatctcccctggaggtgacctctcaacagatggagttggaggccaggatttcctaaagcttgatgacaggcctctgagctcttccctagaggtacaaaagcaaaagtggccactgacatatcagaaagactgacttgtgctccaacttcgaggtcccagtggatgcttttgttgctggtttgttctgtttagtcatgttggagattaaactctctagccagaaaacaaaggctttggtggttagaataaaatttattttgagagcaattatagatctgtaagttctgacctgaagtctcataattacaagatgtagagcttcccatttcagtaagaccaagccttatctctcgaaagtctcagccgtttgcacacagttctcaacctctgggttgcaatgtctttgggagtcgaacgacccttccactggggtcaccttagaccatcagaaaacacagatatgtacattacgattaataacagcgaaattacagttctgaagtagcaacaaaaataattttattgatggggggtcactacagcgtggagagctgttgaaggaccgcatcacagtgtaaggaaggctgagaaccagccattttcccctctctggatccgatcgggctcagggacgccatcactcactcaggctgtgggaaccgggctgtgaactgcaggctttctgcagctacctcacaccgatgggcctgtgtggctgctccagtcagctccccacccgcttggttatatgtgcatgtatgtgtacctgcatgcatttatgtgcatgcgtgtgtgcctgcatgcatttatgtgcatgcgtgtgtgcctgcatgcatttatgtgcatgcgtgtgtgcctgcatgcatttatgtgtatgatgggcattcaagtgcctgtgggtgnnnnnnnnnnnnnnnnnnnncccccccacccctgtataagagggtattggttcattgtccctgatgtatttgggatggtgaagctttctagtcacaatgggcttctatcccggggtgtagagctgagggacgggaaccctggtgaccttcccttcagttgaccaggatgggccaatgcctgtctcccagcttgtttccctggggaaaatctcaggcatctccagttccttgagagcctccacatcctcaggaaagcggattttgttaggagcatggaaacgtgctggagatgtcactcagggaagagtacttgctccatgggtgggtgtgggtgggtgtgggtgggtgtggctgtgggtgtggctgtgggtgtgtgggtgtggcacccgggtttgatccacagcatgggataaggagcagggcatggaggaggcacctgcctgtaaccctagcactcaaggtcacctacaagttcaaggtcaccataggctacatgcaaagttcaaggccaagctgacttacaagggcctttggtgggtggagagtcacctggcctggggtaacttgaactgggaaaagaaaaaaaaaaaaaaaaaaaagacttgtatgggttgttttattctaacttctgaagagtaatcagtgtgtagagtcattgagaacccagctatgccctcctggacatgcatactaacaagaatgccctgttacccagtcacacggattggtgcctagcaaaacatatccacaggcacagtggaactgttccatacaacacatgttaatgcacagaaatgttctgaggagggtgagaacaggcctgcccacatgtggcttggtcctaggattctcactgttctaacaagtaacaagggtgaggtggatctacacctctctaggggctactgctactgggcagctccaggaagatcctccttcctttgggtagcctgaatccacatgtgtcatcaaatgactgctgcctcccaccctttctgtattctaaatgacacctaggtcggggaggctccagcgtttgtttcatggtgctgtatgcagatgagtgtaaggaccattcagggttattttcaagagctctgtctcctctgccctctgctgtctgtctttttaaagcctgtttctcgatgctgggcttctttggagaaacagttttggggggcagggaggagaggtttgaatacaccaagttaccagacaggacttcccttggagtagccccttctgtctcctaagagtaaatagttgcaaacacttctggtggatgagccactctgatggaaccttctgagccacctaaaccttttacctgtgtgaggtgacaggcctaaggggtgtgtctttgtccttctaactatgttggacacaacccttctacaaagaagtcatattcaaatcctaaggctgtatttcctaacatgactgaaaagggaaccagagaggggtgaggctggagaagcggctcagaagcttcctccctgcacctctctggccacccacaggcacctgaatgcccatcatacacataaatgcatgcaggcacacacgcatgcacataaatgcatgcaggcacacacgcatgcacataaatgcatgcaggcacacacgcatgcacataaatgcatgcaggtacacatacatgcacataaaaccatgcaggcacacacacatgcacataaatgcatgcaggcacacacacatgcacataaatgcatgcaggcacacacacataaatgaatattctttaataaaagaaggggaaggggaaaatgagtcagcaaagctatcagctctcccgatccccctcccagcaggtaaactgaggttcttcccaactcgctaccccctttgaagagatcggtcctctccgcggctggtcactctcacctcccttggcattccaggaagcagcatggtacagtagcaggaagtgtcacattcctaagctgaagcccatctttgccactgccaggctgtgtggccttggcattctgtcatctggctggcctgcctctcctcagactctaagtccagtatggaagagaggcttgcaaggctgcttggacagttaagcaagtaaatataaaaggtgcttagagctagacctcttcctcactctaacaaaacgcctaaaaaacagtgcagtaggcatggtgaaagaggcaaagaaactggtcacattgcctctgtgcacaggaaacagagactagagaggaggtagggctaggcccatccccactgaccatgtcctccagcaaagctctccctgataaatgttccaaatcattcctaagcagggccaccagtgggaaccaagtattcaaacacatgagcctctggggacagttcacacccaagccacagcaaatctaggccgcgggtgggtggtttgctccacttcgccacctgggacagagaggccatatggctcagctcgttgtgtgttacaccacagagcctccttccaaagtgtgttccatttgctcttagtctatgtatttcttgtgcccatttcatgattgaccctaggagaaacaccctagcttgttcgagacagggaatgttaccagtgtgggtatgacacaccccgacacctcagcaaagctagagtgcagtcaccccccacccccacccccacccccacccacacacacacacacctacctcagcatggctttgctcttgcttggccacaaactaatctttaccttgtgggcttttctgaaaataaatctgtcagcaactagcccatgcctgcccccagagactgtgtgtctctcagccgacaggccacacagaaataagcagggtctttggtctcagcaagggccatagctgagtggccacatttgcacaaagctgatggcttggggtgggggtggggtgcaggaagcaatgccaccatgccccattttgtatctgaggtcacctttctgtaccccacactgttccagtccccagcacagcatccttgaaggtcacaataacacattagaagatcccgttggctctttcttgaactactgtgcaaaagtcccccaaacactttcgaagcctctgggtcacagctcgaggacctaggactccgcccttgagcctgctcgtgatctgcttcctcctctctgctacactctgcaacacagtctacacctcaactttccatggctccccagaaccccgaaacccagagcaccacagaaaagtaacccccactcccagcagtctcttgcaccaggctggtgccccccttcacacacacacagaaaaaggtatagatttacacctctctcttgcactgaaactccttctccagaaaccccccgcccctttcctctgaagaccgacactggcagtagaaccctgcgaactgcctggctttctgtgtctacctcattgggagtcttcctgctgaagcttcgtctcttcctctctaacgatcctgaatctcttctgatactgcttgccacctgtcatggctatggctagacactgccattgaagcaacacccagttgcggtccagtagaaataaaagatctgacttggagaaatagctcagccattaaaagttagtttcacaaacaaaaatataggaaatttaaaaatccagttcatctctgatgaggtaacatttcagtccattttacagacgacaaaactgaggccccagagaaagtaaggataccatatgtggcattccagtctgtgactgggagggtccagcaaccatgctcagcatcactccttccctgtgagctgatggccacagacttcagagaacacagaacagtgccttggcagccaatcctggaagcaggggtctcacagagctataattagatgcctgggctttaaaaaccaggatggttttaaaatgttccatgcacatggactaaaacagaacactgtggaagttctgtgctaaatttaatggttgttggctctccttttcaaaatgcttgtttctgtcaattagagagagtttagaaaatccttacatttcactgattgaacaagtggattgaacagcatttcagaggcaaactcataaaaaaaaaaaaaaacagaaacaaagacctctgtgtaaaaaaacccaggttcgagccccttttggggaggaccagggtgggggtggcacggtacagctctctgttcatctttcctatctaaaccaccacggaggaaagcgagcttcagtgccaagcctggctgggagtttgggcacttgcttggattcttctggtccggcttcttctggctcttcaattctagctgaacaccccagagttgactttttcatttgaatcctgccctcgtgtgaaaactaccaccatctctcaccattcccccacaccatgcctctcagcccccttgggggtccctgacaatgcccactgcctcccccgcctcttccgatccactcttagttgtgtggtttgcggtgcctgagtgtggaagaaggttttagaacattcagaagacacaaatgctctattatcatttgagctttgcagtttcctataagcatctggccatttcaaaactcccactgacaccggcagacacttggctctctcatgtctgtggttcctgtcatctctgtaaaggtctgtctgggaagatggaccacttcattcacaccactttgcattatttatctggactctgcttgaaccttgggcaaatctccaggcaaagatcttcatcagggtgcaatcactccaggagctgaagaccacaagagggcagtagagactggcaaaagaaagactccctgcaccttgacgaacacaagccacaacagaagcagaaacttgcctgggcctctacttgttcatgaacaggaatggcaatgaaatgatcacttcacgctcccagttgctcccaattttaggcaacaacctccgtcctaaaacagaggcggtcaagggccgtcgacacaggtcttgttgctgctttctatctgcccttgcttgcccaggaactgttttctcaggaacagagaatcccctgcctttaagaagcattgctgacagtctggaaaaccaatactgggacagcatgtgtgaattcaagggactccgatcccacaaagcctgtgtggtggtgatccaggtgctcctggcaggaaaagcaatgtgttagtgtgaaaagagtctaaacataatatgccacagccattccctaaggtggacattgcatgaattggctgtcagccctgggaggtgaggggattggggggggggggggaggcagactacattttcatgggtggaaacacctagaaaaggtaacaatgggatgttcgtcaaaacaggatcctttggggaatcccaggatcctcccatagcagctgggaaggactaaaggcaaacagctttctagggagcacttaccaggtgaggcaggctaagctgcttctaggaatggccaggtctaccccagaggacttggaggcagttaactgttgctggtggggggaggggcacaccctccctgaagagctattggcagttagtggtaactggggctggggacgaggggcagttactcttttttttctttcttcttttttttttttttttagacagggtttctctgtgtagctttggctgtcctggaactcactctgtagaccaggctgccctcgaactcagaaatccacctgcctctgcctcccgagtgctgggattaaaggcgtgcgccaccaccgcccggcagcagttactcttaaggtgcctgtgctcctgttaacgctaacaaaactcagttcgttcgccagaaaacgaaggaaggaagaagcaaagggggtggggggagacttgaaagtggagtggaaattagtgagggagaaacaggaatccaggggacaggaggaaaacaggagatgataaggtgtgtgttttgggggggcggggggtgggatcaacatactctgcatacatgtgtgaggaagagatgaagcaggctcgataggcatgccatccatcactggatgagccaaagaacacgaaggaagaacagatggccataaagagaatagcaatgtctactagaaacaaaccaggcttggtaggaaaaaaaaaaaccaccagggaaagctctaaatcgacccctggggccacattcccccacctacccacccatggggtgtgacctggttcccatagcatagggttccatcagcttcctgtggcttcctggcttcattttaacaggggcaaccacctcattggctacgaccataaaaacagttctcactaaggaagtggctttctgcgtatccccggtccttgtgcatccttgagttaaatgccgcctagtctggcaacacagccttattgtcttgtgccacttggggaatcaaacgtcacagaagagaccgaacgataatttaattcaggtgtgttgagaagtttccgttttctctgctggtaagttagctagggacacaggcatcctatcaagtccaagtacagggctgggggtgtagctcttattggtagagtgttagctagcttccaagcttggaggccctgggttcagtctccagcactgaaaaataaaacctatgaaactgtaagaggtccagtgcagctggaaatgaatgacttgaggatccgtgcaccccggagacgaaccccagccacggcctgtcatcctgacgcacagccacacactcacttgtctgatctcgtgctgaagcagccgagcactctgtctgcaccgccagagctagttactgaaccttcgctattgctcccagggtggtacgccactgcagagataagagtctgggcttcagaaacgagggaggagaggagcctagacatgtcaccccgactcctcatctgcaatgcgaacagccttgtgtctcttgtctccaaactctttcagaggttagactgctctgtcatcctcctgtggttgggggacacccagcctggggccacctgcagtgcagggggatcagcttctgcagccagtggatccagagccctgcactgaggacaatagcatccttctcttcctccacagcactaccacaaccttgtgaggggctggagggtgcagatggctctggagagcatctgcaaggttcacgcatctccatccgcactcgggtgtctttgttataggtaggaagactccccagagacccttccagggctggcggggctgactgtggttctgaggagcatgaagagtacactcctgtcatctgtttgtgactcctggcttgggaagaaaactcttagtcagcgggtgttaacagtcacccagccccaccccctagtcccagagtgtagctgcagtgtgcgtaaacaaagaaaagcatgnnnnnnnnnnnnnnnnnnnnnnnnnnnnnnnnnnnnnnnnnnnnnnnnnnnnnnnnnnnnnnnnnnnnnnnnnnnnnnnnnnnnnnnnnnnnnnnnnnnnnnnnnnnnnnnnnnnnnnnnnnnnnnnnnnnnnnnnnnnnnnnnnnnnnnnnnnnnnnnnnnnnnnnnnnnnnnnnnnnnnnnnnnnnnnnnnnnnnnnnnnnnnnnngtgaaggcacagacagattggcatctggttcatagatggccccttgctcctgagtcctcgcctactggaaagcacaagaccctttcacaaggacactcaccgatccagttatgatggtggaggcaggccttgtgacttccccacaccttcatgttaggggttaaggttccaacatgtgaatctagggcataaacattcaggccatgtcaccttcccagactgttccttctggtatgtcagacatggagcccacaagcctcataaggatgcatgactgagaatacctgtgaatatgacctaacacaaactcatcatcttacttaaaacattaagatgtgttcctgtgtgtgtgtgtgtgtgcgtaaatatttttaattccaattgtaaggctctagagcagtggctctcaaccttcctaatgctttgacctttaatacagtccctcacattgcggtgaccccaaaccataaaattattttgttgctatttcatagctttaattttgctacagttatgaatcataatgtaaatctagtatgcaggatatctgatatgcgacccctgtgaaagggtcatttgacccccaaaggactctcggccctcaggttgagagccgcggctctagaggatgaactttgagatgatgacatcatttcccaatatcaaagtgaagatggtctcaaagccagatcggaaagaatgctgctagatgtcccaaccaacatatacacatgtcctaagagaagccaacgccttttggaatcagggtgtcctgaccctttagttgcacctcctttcgatgatcttcccgcctgtcctcatacaatcggccatgcgcatcaccagccgtgcacatccacagtcggccatgcacatcaccagccgtgcccatccacacctcctgacttgattctgcatctactaggaaatctgggaacaaggaagagactcaaactgaaaacgatgcacctgcctgctacagaaacactgaacagagagaacacccaggtgtcccacagcaggagagggagaagtgcctaatgcatggccaggaggcacaggttacagcataatctccacgtgttaataaggtgtgaagatgcagggccacaagacatctgtaaggtgttcacagggatcatcaatgggcaatacgatcataggcacttaattatttttattttttttaaaaaatgtatgcatcataagttttaaatgaatgtattttatttcaagaaggaataactctgctgtttagaaaatgttacatgaaaagacattcattcattcattcattcattcattcatctacattcatccagagcatttgaggtacaccatgtcccagacatgtcctaagctctggagatagaccagaaagaacccagcagaggacctcaatctctttccagtgactagagaggggtgaccagggacagaacataaagagaccaggctgcaggaagaggaggaggggcacagaccacaggaagtggggaaacagggtcagttgacagggtgagtgggggaccctggggtcttaaggtatcatctgcagactaggaagatgggttggtgtgcctatgcgggtcacagaatcagaaagcacagaggccctccgggggcaagattgcttggccggttccaatcgatgaaatgagttacccagaaaacagtaggcttctcctgtactttactgtgctaccaagagagaccctgtaatggccactaagtagcatccttttaacctgttgcctagcaactgagtagaggcactagatgtcaggattcctagctggttggaaacacaggcggtaactctagctaacaggtaggtccctctagcaagcccaccccaggtcctcatgatttccttctgaggctctcaattgctctgagccagtattgcagcgagcacaggtgaatgcatggccttagaggcagggtgccgtgctgcagccttggttctgtatagtgcaacttccacaaaccctatcctgctttgtagagccttgtcggtatccagataatgagctcagagcatttccatcatgaaaagggaggaggaagaggagggggaagggaggaggaaaaggaaggaagagggggggaaggaggaggaggaaggaaggaagaagaaagaggaaggaggaagaagtaggaggaagaagaggaaggaagagggggaggaggaggaagaagaggagaaaaggtttaaaaaaaaagtgtaagagtggtggcgcacgcctttaatcccagcacttgggaggcagaggcaggtggatttcttctgagttcgaggccagcctggtctacaaagtgagttccaggacagccagggctacacagagaaaccctgtctcgaaaaaaaagtgtaagagaaatctacaacagtttgtgtatttccatggttgggcagcattggcctgtctactctggaatgtcataagtaaatagacccttccaagggtcttgaacttgactgtcaagttcagtggcatcgctatgttacacttcatagagctttgataaatatatttatcaaagccatacttgcactaactcatggaaacacttttattgaagacacatttacaaaacaagtacaaatcagaacatttaaagtggggcaaagggacgtgagacactgaccaaattctccagaggttacccaaaggacccctgggagatttaggctcacactgcaatgtgggtcttagagctcagagaaaccagagcctcttgtcaaaatttcgaggcagaggcatggtatgagagccaacaagcaatgacagactcaccacaactctgattttttggttttttttttttttttcaaaactagagtgcactgggtagacacaatgcaagaaaggcagggtatcaatggtgttaactgaaacctttgccactgctcctcccaaaagtcaaactgtaccaactctgctgctccaaatggtttaacatggtagaacatgggtgtcttgggcaggagagatgactcagccgttaagagcacaggctgctctcccagaggtcctgagctcaactcccagcaaccacatggtggctcacaaccatctatagtgagatctgacgccttcttcccacctacaggtatccatgcagacagaacactgtacacataaaaaataagataaaattaagaaaagaaagacaatgggtatctcccattgctgttgttatcattgttttatggatttttttaagtcagagtctcatgtaacccaggctgccctgaattcctggtccagcattcgagaactgacctcagggttacaacacccacaccccacaatgcaaggcatttggcgtggatctcatcctggttttaatgtgaaaaaccctgcagtaatgggctgggtgtgcagggtccctcccattacacagacaagtcactgggctcaggaggggccatactacttcacttccagcagatgtggaatggggcttgcagtgttgagactcacattgcatggcctgcttgaccctgcccaccccatagcccttcaagggctacaagaaatgcctctgtagttcaaaatgagatgtattagtagcgagttattagctcatttccccatggggggaggacactggctggactcagagcctagaaatccaggcaacatcatgaagccaagcttgacaaatgttcaggtgccatcttttgaagaacccagagtccccaagtgcaagttagtttagtcaaagccaataaaacaggctggttctgtctaaggacaaaagacaagaacacaggaaagttcaagcatttggaattactttgctctattttaaaacatcaaggtgtttatttcccccttttggggataatttctatgctgttttgttttcaagatagggtctcactatgtagccctagctgtcctggaactcaccctgtagtccaggttggactcaaactcagagatctgcctgcctctgcctcctgggtgctagaattaaaggcgtgcccactatgcctgactatatgatttttttccccctagagctgaggactgaactcagggccttgcacttgccaggcaagcgctctaccactgagctaaacccctccaaccccagactatatgcttttcaataaggctgtttccttaatcggtctcagcccaagctacagaaatcccatttttttcctgctgtcccctcccctgagaggccatgaggcccaagggtaatatgtagcctccagacagagcacaaacatgggcaagggccacaggaagtcataacctattttctggtgctgcaacaaaatacccaaagctagccaatatgtaaattaaagagggtcctctatcttatggttctgaaggtccagaaacacaagcaagtatccatctgcctgccccatggtgaggcctggcattatttcaactcaggcagagaatggaaggggccttctgagcgcccatcttcccattaccgcctgctgtcagcctctgccatctgaattctgtttgctctagccccagtgggactgaggctgtggaagatccaccaaccataggacacagcctctctttctctgtctctctctctctctctctctctctctctctctctctctctctttctctctctgtctctctctctgtctgtctgtctgtctgtctctctctctctctctctctctctctcattgtcaagcaggagttttgaaacactaagtctggcagaggctgtggctctgcacctgctctagatgtctctgctttctctgggtttcctgggtgacttctgaggcatcagtccccatggagtctcatttgccatttctttctgctgattcctcttgctttcccccactggtggtgagaatgggactcatggagagtcccaccccagtgcctccctccaggcttcccatgtgtcgtgaccccagcgtacaggaactcctttcgataccagagcatcctttaccaggtatcctccaggctgaaaccagacgacaggagcaccgccatgtcctcccatccattcgatcctgacttaaccaaacacaccctgttcttactgctcatttggaagtagcaacaaaccatcttcaaagctcaccaattaggcaactcctccctggagaacattctgccgtcggcgcttggcctgggtacaaatttccttcatatggatcagttttaagttacagaatctacaaataagaaaaacattcatgcacaaatttcatttccttcttatgttaaccatctcaagataccatttaccctcaagaagttaattatgcatcccagaattagaatttccccaccatcagcggattctttgaagcggcctcctggttggttgtcagagctgttagctaggcgaagaatgaaagagtgtgtttactttgtagatcttccccatgggatgcgcagaagtaccgtccatcctcactctttaccctcggattccttttctcagcccatcaccctctcctcatagctgacagccagcttattaacattgggctggttcccatcactctctccttggggaaaaaaaaaatgaccaatggctttttatgtctgtgtttgtttcagaaagccaagctaggccctgctggtaacaaagtcatcagcccttcagaagacagaaagcaaccatccaacaacctggacagagtgaaactcacagacttcaacttcctcatggtgctggggaaggggagttttgggaaggtaagaagagagggggtttgcataaaagtctggagcagtactgctcaagtgtggaccgaggtgtccctgtagtcacacaggcacatgcctcacacacttcacacttggttaaaaacagcgttggagagttggagagagatgactcagcagttaagagttggagagagatgactcagcagttaagagttggagagagatgactcagcagttaagagtacttgctctccttccagaggatctgggttcagcccccagcacccttcgggcaactcagaaccaaccacctgtaattccagctctgggagacccaatgcctctggtctctctgggcacccgtgctcccaagcatgtgctccaccacacacatgcacacatgcatgcaaaattagaagtaaaataaatctttttaaaaataattttgaagccaacagtgctgagattagggagatagctcagtcagtaaagtacttgcaagtagctctgaagctctgtgagatgtggtggcaagcactgctaatcccagcacaggggacaagtggttcctgaggctcgctggccagccagctgagctcatttgaccagttcaagtgaattgagactctacctcaaaaaaagaagaataaaaagaaagaagaaatgaagaaagaagcacgtgttctctctctctctctctctctctctctctctctctctctctctctctctcgcaaacacacacacacacacacacacacacacatacacacacacacacacacacacactaacccagaaagcaacaaagaattagtttgtggtgtccccattccccagtgttcagagtacagggcatgctcccaatcactagttgaacaattaatttccacaactgaaaacgaaacgtgaactcacccaaagcctggatggtcacaatgagaccctataatggggccatgtggacttcggtctgcgcagcgttctctggcctctgtggctccaaaccttgtgacagatccatgagctgattttgagcctgcctttttcattgtttgtgtcctgggccttcaaggttgcaaaggttgctcacattttaccctccaaatgcttccagaaaacatgaatatggaaaattccaaactagacccactgaagagtattaaatatccccattaacagacaaaaatagcaactttgtatataaataccctacactgtctacaaacatggatactttaaaaaggaatatgaatggtgaaaatttttaacttgtggcatcttacaatacttaaaaatccaaaagtttatgtgagccagctttccataactataatgaattacttgaggtaatatatgtataaagagaaaaaggtttgttttgactggtggacttagagtctgttttggttcatggttgagtggtcctactactttcagtctctggcaatatagggcatcctggcaggagtatgtggcagaacacacttcaccatcatttcatcagacaggaaaaaaaaacaaaacaacaacaacaaaaaacaaaacaaacaaacaaaacaaaacgtggccttcatcccacggtgcccttcaagggcattgcacacccacaataacctaaaggcctgtgatggttagctttaattgtcaatttaacacaacctaaatagaatcccttgaaaacagagttgaaattggtttagactgtggacgtgtgcctgggaaattgtcttaattaaattagttgatatggagagacccagcccaaagcaccattccctaggcaaaccatcctgaactgctcgcgtgagctgggcacaagcatgtacatattgatgtctctctgctcttgactgtggatctgactagatatttgacattcccgccttgacttctctgcactgatgaactgtaacctggaattgatggctgaaatgaatcccttatccctcaagttatttctttgtcaagcatatttcatcaaagcatcagaaatgaagccagagcagacctcggctcctacagggcctcccactccccaacccttgtcacaccgaggagcaaagcttctccatgcagacttaaggggatgccacccaggatgaaaccacagcagaatgtgttagcattttttcacgagtcactcacagacctgcaccagctgttgccaaactgtctcccgacactgttccccacaacctccgcccccactcccggtaccagatgtctgcccaccagtgttgagccttctctccttctgtccccacccccactcccccaggtgatgcttgctgacaggaagggaacggaggaactgtacgccatcaagatcctgaagaaggacgtggtgatccaggacgacgacgtggagtgcaccatggtggagaagcgcgtgctggccctgctggacaagccgccatttctgacacagctgcactcctgcttccagacagtggtgaggactgtcattcctgtctaacactacatcatggtctcgagacactcgggactttaatcccgtttcctttgggaacaaactcacactgttcagctttcattacagcagtggttacattatgttagaaataaatagtctagagatgattggtgttggtgggcacgtgggcatggaataaatacaaataccaaaccactttaaataaggggcctgcacgtgggaggatctgggtgtccattaaggtcctccaagtggctgtacgtgagaggtcttcttcctgtaggccctgggctaagactttcgcaaagcagttgtggattcacagccctgccttctctttttaagcaaaccaggctggccttgaactcagagatctgccagcctctgcctcccacgtgctgtgattaaaggtgtgtgctaccaaagctagccagccctgccttttacagacaaccccctcccccatcctgctgctgccactgccacgcccagcattgatatgccaggacactttgttttctgaggagctgtctctgtataatgacacagcaggaggagcaagctgtgacctgtccagcagaaaggtcacaagaaaaagcccagattataatatttcctcgcatatgaaattcaaaatttaacattctaaggacaaagctacacccctccactttccttgtcacccacagctgcttcctgactgtaaaggccttgaggagttgtaagaaacacgcaagccttgcccctacaatctgaccgtttacaggaaaaaggtctgctgaccttaggcgcagagtaaaatgtaaaagacatgttcaaattacaaagacaccagctgtggggcttcctggtctccccacactgacatgcattctaagatgcagcgatgagctgaggggttccccacctccaagccccactctccaagcagcggctgtcagatctcactcccccgacagctagtgttacagtcaccgtctcatgtaaaacttccctgtgatggaaaaatgatccgtgcttaggcctctccttttaaaatcttggggaacaagatgccttgagaagcttggagtctcgaaatgggggattcctgtggacacggcgtgcgccgagcatgcaatgttggcagaggccgctgtgtgtcagccttgcactggtcatacagtcggctccagccctctcagagctccagagagaactggtgggaaggttaggagggagaacacaatctcagccctgttctgtgagcccacgggcacccgtgcagctctggaaaactgcgaagaaactgcgaagaaggaattgaatccagagccgggggttcccatagccacttcggggctgttgacaccagctccgtcatctctccctcctggagctacacttgaatgtttaatagccccggtgtgtaaggggggttgctttctagactctagcagaggtcagctcttaccatgctctgttgtgctgctggttgtcctcccattaaactgcctggcataatgtccccatctgtcccagcataatggcctcataactatgcagacttacttggctccctgatatatgctctccgtggggccagctcttagcataccagtgacagaaaatatttagaaaaaggcaatatttgagcacattctggaggcaaaagaacattgattaaaatctccttttatagtgaacccctctcttccacccactaaatatcattacatgtgtgtaatttatgagttcaatataaccccaaaagatatgttttcagaagcatccatttaagcaccttactgcattagcccagcatagctcctggaagtcgcaggctatcttttacgcatgcgcaccattgataacaggggttaagatgaaatgacaggccccgtatagggtcttcgtaccacccctgattgagagacgaactgtccgtacgaggaagtctgtgtgggggaagggaaagaatgtttgaggcctttactgtaatgaggtgcataactaccagtaggctgacctgttagcagcgtccgtcacctgcagatgtacggatgcacagtatcccccactcagtgaagagcagatctgtcaaggtcaccccgtgtttgctaatatgaaagcaaagctgataagctctgctggggagggaccctcctcacgtgtaaaccttggtctccaggaccggctgtacttcgtcatggaatacgtcaacggcggggacctcatgtaccacattcagcaagtcgggaaatttaaggagccacaagcagtgtgagtaatctttattaacatttttctttctttcttttttttttttttttattttgagtcttgaaattcaaacagcctaattctcccaactgagaactccttctagattctatgtccaagggcaactctgctcacttgggtctcagctctgaaacttcccagagtagcagctgagccaacaggacctgtgtataataggtatgtcttaggaccagtgattctagtctcagcagactggacatacggacgcccgcctccccatcacctactaacacccgaatggatggaagccttccccgctcgctgctcatccagcgagagtataaagggatgagaggcccttgggtagcccatgctctcattagaaaaagccatccaacagtcttgacacattgctgaaacagtgcaggtcaacacagggtaccactaacactccagagtcggagagtgggtgcagcacaaaactgggggatgcccaacccagagatgagaggtgcctgccaaggaaaggatatggagccaagtccagggggtgaccttcagcttaggtgacatgaggtggtgggggaggctggacaaagaagtgcaaaggctgctgggagggcagcctatgaggatggcagagagaagggcttgatcccacagaagttctgacagagcctactggctgagacaagaggaaaagtaaggaaggggccggtgcaaggggacccctgggaaccacggcagggaagaaaaaaattgagctgaaagtaggtctttatttacaaggaacattctggaagaggaaaagccaaagtgcaagagaaggaaaacctctttaaagtgacatcacaggccagggggaggacactgtccaggaggagggaagcttgtcttcgaacatcacactgggattgcaccttccttgtgggaatgcaggagcagagagagggcaggaacctgaggagttagccatccacggggtgggggtggggcacgggtacctgtgctctttcccatctcctgggatccagaaagtctgcaacttatatagaagcaaactgagcagagagctcttttccagacctagacgcagaggcacagtgcgcctgcgcccattagtcaagtcagcaaatggaaacgggacccaggctcatgcgtggcctgaaacataaatcacgggaacccagagcctgtgtgggataatctgcaccataaagattagctggacgaagatagggagccccttaggtaaaggctttaaaaaatataaagggggatttttccttttatttctactaagaagcaagtgtatttcttttagaaacaccggcccttacccacccacctcattgtatcagagtactgagatgctcagattgtaaaataaagctgaatagcccaaagccagaagaaaattaaaggtggcagagtggccatcttatgtcacaaagatggtgcctctcctgaggccctttcgtatctgtactgcagaaaagttaaaaataaaggaaacaaggaaaataacatgaaaatcacccacggtcctactcccccactgccccctacatcctcccccacacacacctcccagccctaccctggcctccctgccagccctcactaagcctcttctcttcggctctcctccactctgcagctacggtgcttattttaagcctcccgggtgtattcacccaggcgtggacttgtggctccttggacttcaaaggctccccagtgctatgcaaattttaaaacatcattctgcatttaatccgagctccagatattaacctattaacgattttgtagtgatggtaatgactgtttttattatgaattatttaaaagggcaaactcgggcatgaatcatggagcgtgtcccatttattccgtccggcacttcagagaatgaataaagcaagcagctagagcgtacagcgcacccgaggccttgtcttccgggagcggttacactctcaaacagcaaactgcttcgtctgtgtgtcggagaaaagagacccttcccctcaactaccctcctgacacagggggtctcaccagtgttcattccttacgtctttatattaggaattattttgtagggaataagtgagctcctcacttcccccagaaacaaaaaaataagcttttataactggagaaatgaagaggcaggtgcagagccagctgtggaaagcacgtgaagggtgatctcagagagcgttagaatctcgtctctctaggtctctgtctctctctcatccctccgatgccccagcatgagtgtctgaagcacactttgttttgcagattctacgcagccgagatctccatcggactgttcttccttcataaaagagggatcatttacaggtgagtctcagagctcttcctgctgcagaaagggaggagaggtttggggagcccctgtgggagatcctgtggtgcagagtccagagtcgtgagaacacagacctgctgagacccacctgctcctgcggccacagggcaaaccagagccactgctttgcttggaggctcagaggtgttacatgtctccttcctgcggtccacgttccctgctctgctggcagtgcctcctctgccttttatctgagcagaggtggaggtcagagagcagcagaaactagatagccagtctaggatcacagcaggcaaagggagctgggagggagggaaacgggggggggggggggggactactggatcaagtacactggagttcactgctgtgaaagtctgctaccaaaaaagaaaaagtatcttgaataattaaaaagacactggctcaggcaggttagagagacatggaaggtagctctaaacctgtcatttgggttacctgtctgtctgtctgtctgtgttcccacttctgtgtcaaatattaataaataaaatgcctggcatctccccaaacccggtcatttggaatccctggatgtatagccacagacccgattgggaaatcaataattcatttggcatttaaatatctatcatatcccagggtctccatcgggctctggagaaagaaagacatggtacttccttggcccctggtctccaggacttagcatgtgagtgtcactgagacaagctaggcaaacgtcctgatatgtcatcagctgcaagcaaatcaagtcatgtcgtggctcggcctctgacactcacttgctcccttgcagggatctgaagctggacaatgtcatgctggactcagaagggcacatcaaaatcgccgacttcgggatgtgcaaggaacacatgatggatggagtcacgaccaggaccttctgtgggactccggactacattgccccagaggtaagagtaccagtcattgctgccaacctacaaacatacaccctgcaaaacacacaaggtcatgtgtgggtcacgatcgctgtgtcaagcaaagtagacaaaagacactcaaataggaaaaagaaatggaagtcagcacacggccaggctatgccctacttccccgaacttctgtttttgtcccgtgtattcgtgaggcagccatgtggtaagctgtctctcttaaaagcctctggtcataattatttcagagacactggagttgggggagtttgcttgtatattcaatttgcctgtagatgttgagtgagacaatagccatcatcatgacttcctaagcatcctgagtgaggacacttgtctacgtggtgccataattctaacgtaggaagagacagttggtgtgatttcaagcatagtcagtttcatggctcatatatacagtaggggccgaggtgcctagtcttcagtattgtgtgtaaagaaacttcctatatgccaataagaagttgagtacggccctgggcccttgtgtagcatgttctgtccacactcaccccgtggacgctggagtcttttcccatccttgccccagcattgtgggaatgtgggctcacagtggacagtgggctagcctccgttctccacagacagtgggctagcctccgctctccacagagccactgttggcatatcccacatctgttcactaatggccatgagtttagctcagatacaaggatggtaaaaaaggtcagttgagaagtcaggcccatgtgagctctaagcatggctgttatctacgggctgtagggattcaggccagtttcttaacctctgtgccctccccgctttcctcaaatcagtgacagtacacagtgccctggaaagtgcccagcagaccctcacacctccccttgttggcctggcgggagttgttattccctagggaaactgagctctagcttgtggtttagcctacaaagagactttaattataaattcagtttttaagtgatattctgtgtgtgtgtgtgtgtgtgtgtgtgtgtgtgtgtgcgcgcgcgcgcgcacacgcgcgcatacatcacaccaccccatatagaagtcagagaggaggaaggagtctccaggatagaattctgatcatcaattttgacagcaaaaaccccacttactgagccatgtagctggctgcagaaattcagactttgaatggcatggccaagggcgttgtcctggtgtttaaccgactaggatctcttggagtagggggacgctggtcattactacctccagccatcctgtgagcttgtacgatcacatttttaaatgtgaagactaaagtgcagggaaaatgagagaaatgagagccttactgcagcgtgccttcggaagcctccctgaagcctcctgtggctgacaggtacggagaaggctctgggtaagatcctaccagatcccaggatgcctgatgacaaagggaggcagcagtgtgtctagggatgagggtggctttgaacttcctctccacgaagcccaggcttctcctcatcaagccggtgcctacccatgcctgcaccacttcagctgtctgctctatccagggatggcactcgcccacagatggaattatctatataattaagctttgtccattggagcgacttttatttctgttcactataggaatgccctattgctattgtaaccattaaccatgaacttagtagtccaaatgttaagttaaggggtttggagtgttagaatgtcagaatggcctgcctagcaggttcaagccctgggttcaacctagcaccacaccacacgtacacacatataaaaatttagtgcagatttataatggtcagaagatcagtatcattgtttctggagctgggggatttactagtatatagaatctgcctgcgaatgtggagagaggcggtagtcacggtcatggctccttagcatcattggagtgttgaggattctgggatatggagttaggattctaatctaggaagacagtcgatggggctaaaagagcaagcttgtctccgtgcttggtataatcaccagtacccacgttagggaagaccatttcttcaatgcttcccacgccgatgagctgtgtgccttggctcgtaatgttttcttccaccttccaagcagcggcagcagcagcatctactgatcactgtgtcttccccaagtccagccctccccttctcacagcagctcttgtgattaccccccacgccaaacactctagatctgtctccacgtctctagacctcaggttgcatctgaaaagtccttactatgcaagattgcattcacaggttctgaagagtagaacccggacatcctttagggaggaaggcattcagctggactcattcggatgagactttctgctgccaaacacacattctaagcgtgctttgggaattaggggactcttcatgcacagaaaataatgtgcccgtgctgtggtgagcaccctggtttctgaagcctccatttttcagttctctgataagtagcaataagatagtgaccagtgtgtgttgccttctgtgcactaggtacctctgatacacacacacacacacacacacacacacacacacacacacacacacacaccttagtcctcaaagcaaatcccaaggtagcgtcaggccttccttcagatgaatcaccttaggcctaagaaatatgtctaaatatgtcaaactgctaccgaaggctagagctagggatcatcccatgttcaagccatctccggacctcctcaccactcaaatccgagcagctcttgtacgcagactgcatgttttatccgtttccctgggacaggttcctgctgcacagcccgacgtgcttagttttaattgtcaacttgacatactctagaatcccctaggaagagattcccagtgagacactgtctacatcggctgtgccccggacatatccgtggagaattatcttgacgtgggaaaacccaatccatggtgggcagcactgtcccctgagtttaggtcctgggctgtatacaagtggagaaagcaagccaagtaggcaagtgctagatacgcatgcatctgttctctgctgttggctgtgaatgtggctctctgtctccagtttctgctgccttgacttccccacagtgacagactggaacctggaactgtgctgaaataaacagtctcccctaagctgctttttctcagggtgttttatcacagtaactaagcaggaattgagaaccaggatgcctccttccttccccacttcctgctgtcccatgctgtgattacaggcatgggccacattcttagagactcgctgtaccaagtgtggtacctcccttcagtgctgacagttcagggaggaaacattcctggagccacaagccatgcccaactttctctcgctgtccagttggctctcactgcatatataggcaatgctgcctgggaaaaaaatcagtggctaccaccatcagattacctctccagttctcctctgggcatctccacacctgacacatacagcctcaagaacatttacagtttaggggaaaaacaaataggttcaaggtttcagaatttgttcaagggttaaactaattctatcatctatgtaaatcttcctgtcagtcagaagcaacatgattatcttagatggcattttctctaataggcaaagcaaagggtgaaatatttatggctatctgttcaaataccttgaaatcgatttatactgtggcatctccctaatggttgaagatggatcaaagcgaagagcgtcactcacagatatgacttaagagtgaagatgaaaagccacagaggggttgccttagttagtctactgctgtgaacagacaccatgaccaaggcaactcttataaggacatttaatcagggctggcttacaggttcagaggttcagtccattatcatcaaggtgggagcatggcagcatccaggcaggcatggtgcaggaagagttgagagttctacatcttcatcttaaggcccctaggagaatactggtttccaggcaactaggatgagggtcttatagcccacacccatggtgacacacctatcccaagaagcaccactccctgggccaagcatatacaaatcatcccagggtactaatcagaaaataattctagaaaccaacatgagggctctctttgctctgacatagcaaaaattctctgagtccgcaagagtccttgagtggacaagtcacaagtcatgcacctctctgcaggctcaagtaccagcacaagaggtgctgatgacaagatcaggagtctcatctcatgtgtctatagtcccgccctctgtaagtcacctcccagtgcctgccttcttagatgttgggagctcctggtcctcttcctaaacagacactgcatcatcatttggagcccacactaggagggctttcccatcttcctctcccattggcttctttcctttcaatcttgatgccttatcctccctcctcatcggtgctgccgtcttctttccttccatgaagtggctggccagtgtccttccctgtactcttgtggcagtgcgagggaaacccatttgtagtgtgtcacccatggaaatccttgaagccttgctaacagaggggatgtgctaagtggccagagaaccgctcccacaatgtgttggctctgctctgtcccaactcccctgagcacatctttatcagcattttgaggtcctgtgacttacatagaatcacacacctggttacaggcaaggttagatttggatcctagatctcctgacccgaatggctgtacattttctttttcatatgccagagacaatattcattttttttcttggttttttgttgttgttgttgtttttcgaggcagggtttctctgtatagccctggctgtcctggaactcactctgtagaccaggctggcctggaactcagaaatccacctgcctctgcctcccaagtgctgggattaaaggtgtgcgccaccactgcccggcagagacaatattcatatatatatatattgtctctagagtcatggagaaaagcaagttaaaatgagtatttaggggctgagaggtggctaagaaggtaaagtgcttgctgctcaagcatacagacctaagttcagatccccagcccctctgtaaaagccgcctacagaagcacacttctgtaactctagggatcgagggacagggatgggaggatcctagaggatgagctctcagtttagtgagagcctgtctcaagatggagagaggttgaggaagacagtgttaacatcttacctccacaggcacacacacacacacacacacacacacacacacacacacacgctttaacatgagcgttcagttatagtccatcttttcattggcatttctcaggaactgaaccttatgtgacctgaaatcaggcactaagctttggtcagaaacagtcagcatctaggtgtcttctagccagccactgatgctaagctgatcccttaaaactcaccggcaatctatgacatgtggtccaccacccagcacacagaaccaatcagtcagaatattcatcaggtgcctccgtcatatattctgtggatgcccttccaggaaggggaacctgctagagaccagagggatgacaacagcccaaggcgagataaggatttcaaaatgacagattcctgttggcaatgacagtacctccaacatggctgaaatccatgtagcaggctttgtgggagcagaggggaaaagtctagtcaaggctgagattagaggagtccccagagcagaagatttgtccccagggcatggcttttacattactggactctgctgtgacaacccagtgctttctgccacaatagccagagagctatacttttatgcaaagcttgcctaattattttaagtagtcctaagatatagtaaaagatatctttccagtgagattcagccagtgagccatcagctggggcctttcttctggaatgatcaggattccctttctatatagccacatgttagggagggcacaggaaagccaaggctatgcacagaggcaaagcaggtagctggagctttgaggatcaggaagtcaacacacaaagtggctgggaccccaggggtaagggcggagagatcagagacccctgagagagtaggcgtcaacggcagcgagggagtcagcagtcaagtgagaacctctgtgggggagtctgagagatggagaggaggaatagggccctcccggagaaggccaactaaagggattggcatttcagctacagaactgagaatgtttccaagacataggggaatgcaaagggggaagggccagggagactatgcgtaagtaaaagccatgctgcatgaaggaacagaaatggggacatgaggataggtcctctcccttctcaagaacaagacggtgatgagcaggtaagaccccagggtggtggagaagctagaatctgaccaatgggaaaagccacacctttatagtgaccccaagatctttgtcagccctgtgtggtttagatgtagcgtgtccttcaagggaactgctagtcccctatgtaatggtagtgggaagtcaggggtcctttcagaggatgaacctgatgcaatgtaattaggtcattggaggtactgcccttgaagcaggggcttgaaggtgtagttcctgtagggtttagttggttcccaattgtaaagaccctatctccaaaatcaaggtgggtgtcctctgacttccacactcccacatactcacatgcatatcccaggagagcatgagaggacaccttgctaacgctcactctcatgcgcaaacacaccacaccacacacacacacacacacacacacacacacacacacacacacacgcatacacacactagctccctgtcttgccagggtggatactccctttgcagccatacaccctggccgtggcctcattcaccatgtggcatggctaaggaatccctcaacagacctgagcagatgttggtgccctgttctgaaccttaagaactgtgatctgaatacaccctttcattctgttattcagcctcaggagtactactagtatagtaccaggacctgtttaaaccactctgtcattccctccctgccccctgccccctggcctctgacccctgctctagatcagctctacacaagcttccgctcctcaccttgccagtcaccccatcctccggggttttgctgttctctttccctccacccagatatctcaccccaggcatcagcatacctccacccccctctttttacctccttcaaccctttccttaccatcttggtcctctgtcctggcgaccctgtgtaaagctgcatagctccagctccaccagtcaggacctatccctcatctcctctgcgggacttggatgtcctatgtcacagggtagcattgtggtcttttgttcagtgctccctgccccattcttgagagggtgccaggcccggagtgtggcttgggaagaaggcacttagacactgctttcttgcgtgcaaccatggcttttggagagcccacggccttggagctaatagaatcgggaagtccggagcagaattactggaagggtcatctgcagctgtcacaatatgggggtgctggtagagaataagccacataactctaaagaggcctgtgagctcggagtatctgggagctgatgggacagcagctcagctcctctagagagccagctgtcccagagacttaaagccagggcctgggggaagggctgcaaggaggtatagacaagtaaaagaaaaaaaaaaaaaagaattaaaaatctcaatgaaaaaaatagttcctgcagtcacacagccgagcactcaggcagtaaattggcactcggctaacagagagaacggtaaaaactcagcggcagctcctgcaagcctctccagctgcatagaccatgggccccacgcctgcccataagcaggcccattaaagaaagaaaacgataaacccagcgcagcactctttctaccggagcccgtttccctgtctgcagggtcacggtccagagacttcagcactagagagtaaatgagtctctgctctccctcagagaaacacttaaaagagcccaaactaggctttccttcttcatcttccttaaattgtgtgaatctcctcggaacatctcggtgacttatgttggggacgtgatctcatgtatttcattgtctgcccacaactctttaaccgtctcctaattccccagcctcagagccggtggactctgcttctttctcctcagcctttggtaccacccatgctactgtggtctggaagacagtgtgcttcttcctccccatcctccctcccaatgaccttcagaaagaaccaggtcccagtagatgcgctggcccttggtgaatgcttactgcatcctggaccagggcacacgctccctttgttgtttgacccagtcatcaattctgttttgcacataaggatttttggcagagatttagttcatttgtcccaaggctccagtaagataggcctggactttgaacccagctttcctctgcagcgcctattgtcctgagaagaagggtattgtagctttccctcagaagataccctgagcacccatcacacccccataagccttgctaacacaagcactctcattctccatacccggaggctgtttcctcctggtcctcaggagcctgtattaattggctgttcatttagagatttatttaaatcccaagaaaatgggccagggatttctgagccgtatcccaccccttcctccgtgagtattggtggggaggaagtggatgtctcaagacccatacccaacacttactcatttcctagtgtgcgcctccagctcacacccagtgagtgtgcacctcctgctcacacctggcctgtcatttaattcctaagctcacgccagtcctttgaggctggttgcactttccctggttcacacggggaaagcaacttggaaaggggcgctgacctccccaagcaaggccccttctcagtgtgcgtgcctcccactcttaccaaacacatcttggaagaactcctggattgtgaggcctctgggaaagctaaaaagctcttacaaagcgtatgcctaactctccttccgatcctttgtataaggagttactttgttctgaagtgtagttaacatttctgaatggctctctgggcttaacaggggagtcccacgctgggcctcaggtgaatacctggctatgaatcccgaaaggccgatactgccctgatctgtgtagcagccccttggaaagaggcagagagatcaagacaatgcgttcgatcccaggctcatgatttgtgccccgtgtagccatgtggaatatctagcgctgaaaacagactttcattcggcttcaggctcttttcttccttctcgtttgctaagtccttgctatagtgctgcttgtttaagaacttggtgtgacatctgtaaaacactgaagcgggggagtattcataatttcttcctctaaacacaatttttggcaccaaatctgccttgaatgagcttgccctgcctcaaagggggcagtccctaaactcgcgcctgaggcttgccagttgcttctgttctgtccagtgtaacaaacgcaaaacatattggtgttgtgcttgcctgtgagcatgcgcgcaaaggccagaggaggacatctagcactctgctctatcgctctccgatttatgcccctgacaggatccctcactgaacccggagctcgactgccctcccgtctgtgcctcccacagccctggggttaagggcacatgcgaggccatactcagcgttctgtgcagtggctgtgggtagacctcgtgtcctcaagtgtccctccctttgtatgggaagatgatccacacccaaataaacagacacttcctgtcctcttcagtcatagacagaagcatcatttttgtcttaataaaaaataagttatttcgaccctgtgtccccaggcttctgactctgatcatattcattgtcctcacacaatgtgcttcttctggagatttcaaatgttacagatatttcttatgtgatgttctaatatctgcgattgtagacattacatttccaagtactcatttcatatccacctccacagtcagagccattagccctggttgtctagcagaatgcccaccccaagacgtggcctgtcagccgtaaatggtgatagatggagaaaaagggagtggggagggtccccataacacaaactcatccaattacttgaaggcagattttacataagtagtatctgatatgtcattagctagtgtttgtccactgaatagaaagggttgttgttgatttgaatgccattccagagcgttcaggcagtttcaagggctgcctctcctgaggtagtgtctcctcgctcctcccttgagcctggttgactctactgccccgaatacctttctcccacatacctggttctcatttctgaagtcaggcactgtgggttttacagttacctcccgtaagcccatctcagtgtgaacagagcctccctgtggggactccaggaccactgctgaattcctaagcaagttgcccaaaggcacagagcccctgaggggcagagctggtccccagtggttggactcagagctctctcaccccagcatgcttccctctgtgtgttgagctcagatgggatcatcagagtggggtctggttaggaagcctcccttgtgccattacagtgtctcctgtgtttcatcctctgctctggtaccacagaaggggacagttggagtctcaaggactttccccaacctcgcagactggtgagcctggaaatctcaagcaagcgctttgctgtgggttagggttaagtccctttcctgaaccctgaggacactttttatatcacctttccatccctagcatcccggcatccctaggcccttttgactgtacacatgagagtcgggtgggcatgtgaactgggttggctccgatctactcagtctccagcaaagcctgatgtgtccacccagtgctgggtgaggtcctgatgctgggagcagagacaggtcctctggtgggtacggccctcatgaggagaactctggtcctgagtgaggctgacaaacagtcttagtgtaagacagcaacggttccaggagctgcctggccccagaggagcaagtaaaagagaagtaagtgaactcagagtctctcagacagtcctgtctgccttcttcccttcctggacaggtcagcaggggctttgatggtctgtacaaagcttctctcataggccctgtgttccttcctttgaaatttatggtgtttttcaaaacaagcctacctcttccatcacataaaatgttttgacttggaaaaaaaaaaaaaaaaagggaaagctatcttttgtttccttgagaataaaaaagacttgaacacattttatgcatgaggccggtagtttccagtggcagcttggaaggagcccccacccccagcccttttggtggtcagaccttttatttatttaagaatgtactctggggagttggtacacattataggaaagtaagagcaaagtccagtccatgcacacaagccaacagaaccactaactccatcctctgtggtgttacggggctcataggcaggagtacagagggcaagctggcttcccggctctttggctccttttaagtctttggcccatcttcagcatgaacctctaccgagcaggcttcccaggagctgtctaggaaacctccctaggtcaaaagaagcagtgtattaaaacggtcaaaagtgaagccatcgtagctatctggataacaatcagacccagccttgcctctcactataagcctgagaaagctacacaactcttctctgcccctgttcctctttttgaaacaggcctcagacggttgagatgagtgagcaggtaaatggccgtagtgtcagtgtctccaagctctcccacctctgagctgtcagatgtcaggggtcatctaaagcatcaagcactctgggatgccttcaagccagtcgccttggccaagggggaaaggctgggtggcctttaaccaacagtcttccaggagccctcattgggccactggcctaacgagaaatgagacgctgcccctggtcctttcatgccctggtcctatgcccagtttggaagaacgcttattcatacctcatttttatagacaggcagccatttgtaacaccctgacagtccccccaagcaattggctcatatacgtataatcacagtgatcatactgacaaatagctgtaaaaagagttgacagtggccccggtcggggtctgtcttcaaagccagagttcaacctcccatgtgctgcagggaaacccgccaactctagaccttctcgccaagccggcctccttttgtgagctgccccattatgggaagccaaattgccatggcagcccctggccttgggcctcagcatatcagggagcccaagcttggctgcaagcctcccttggcccacaagtgccaggagcacctgcatctgtccccactggtgatagacccaagagactctcatatctattctgctccctctgaacctggtcttcagctcaaagctggaccctgaggccagtgcaagccagagaacctgagtgagttataggaattagattgactctgagagcccagaccctcaatgcccattgaagtgaaatgcaaaccatagccgcatttagcaggcctgtttttaatagccacaaaagaaagatacagtagattttgctatatcccatttaacccagtatacccaacattaaaacactgcaaaggagctattttccatgttctataagattctaaaaatcttgtattttacatcgagggacaactcagtttagactagccacatctcataagcttagctagcacacacctaatggccactggacagcatggtgccaggcaaccgcatcccagatctgtggatctgaccactagtcttcgagaagggctcctagtaacagtccctttctccctgcgggtttgggttcattcgcgatgtttagtcatggcagcagatccctgagtgaaagtgtgctttcctgtgaaaagatagttttggtggtggggttgctcagtggaccctggaaccgagatcatttggtgtgcaagcccagggtggctatggtgctttgaagagggttggcccccatagactcatgtgtttgaatgcttggcccatggagagcggtactattaggaggtgtggccttgttataggaagtgtgctgctgtgggagtgggctttgaggtctcctatgctcaagctctgcccactgtggggcacttttctgctgctgccttcagatagcgatgtagaactctcagattcttttccagcaccatgtctgcctggacactgccatgcttcctgccttgatgataatggactaagcctctgaaactgtaagccagcctcaatgaaatgccgtcctttacaagagttgccatggccatggtatctctgccatagcaatgtcaccctaaccacagtagcatctatgaacgtctccaggaaggcgttcaggccgccttctaaatgccacctctgtattacacctgacagcacagcatagcaactgtattctccatcgggtagctcaacaacacagtgggtgggagaagtctgtggcactcaaagttctgctttcctgcaccctggagaacggagacggtgttttcaggaggggtcatgggaggttaatgctgtagaatagagagggagtgagctggagctgagtggagagaaggaaaaactctattagatggctgtgacctttaggacttgtagctctgtctgaacagaaatggactcccacactctgtgacagctttctagaatcaaacatgacttagcaccacgtgaacacgggaatctggccggtgggattgctcagagaatcgtggcatatgtaatataaagtgataggaatgaatggtgacacatgctgatgtcccagtactcgggatgctgtgagttcgaggccagcctggactgcctagtagcaagaccctgaaaagaaataaagtttagattcctcattcatttagctaccttctgggttcaacatcagatccccaggacagggaggaacacagatagagcaactggctttgtatgctgaagagagcagtttatgcaactgctttgaaagcgttgttattccactatactttaaaccatttgaagttatttcagaccctttagactgatcttcaagtcaagttcagcatagatatatctgaaagccataaaattctcttaaaatcaaatgaaccagcattcagaaacaacttaatcattgggtggatttggacaagtctgttaactttccaatccttagttttctcatctataaaatgggaatagtcatgtctctccatcatgtggcatgagaagacataagatatgcataaagtgtcccacatatagactttgactctctgaagaagggtttttattgctttctatttagttcagatgggctttgaagaaaaggtgaggtgtagcaatttgttgttagtgcgctgattctagtcactaatatttccattgcttgacactgaatatctgttcactgcgagcaagcagagatcaggcgaccttctccctcttgtgtccaggtcatcctgacagtgaataacccagattcatcatggcaggagacaaatgagcttgcaatggcctcaaccaggaaataaaatatcacttctctctgtgtctattacccagaagtttttctatttaaaagtataaatcttggactctcagagggtatatgaaacaaaacatgagacattgggggtttgtaaagaacatttgtaaaaattaaagccgaggctccatatccttactatataaagaaatctcattaatcaataaaaataactgatgtccctgtagtccatgaggatcctgtccttgctacagtgcatccctggcacttcctatagtctccaaaagaatgaatgagtgggcctgtcagtcaggattgccaggccgcttactaacgagagaagcacaggtgtctaattcccatgtgaataaaatgccaatatcgaaatatcacttccggccaccaaatggcactctgagaaacaatggcagtaagtgctgttggtgagaattcaaggacacagattcagcttttctgctgctgacagagatgcaccgtgctgccctgcaagcaatctgacagtgcccagagctttatttctgaggcaaaaagaactattctgacccaacaattccactcacagggatttgtcctgcagaaataattaaaggcttttgcagagatgtttatggcttactgttttttttaatgttatgtgtatgaatgttttacttgcatgtaagtctatgtaccactcatatacctagcacccatgaagaacagaaaaggaggtcagatatcttagacatggaattataggcactgggtattgagcctgggccctccataaaagcaaaaattactcttaaccatcaagccatctctccaggcccccatggtctaatgttgaataaagttaccatagactagcagtaaagtttcttattagttaattcttgttgagaagaacagtcatcagggataaatcagtagaaactgactttctaaccatcactgtcctatccctaaaccaaacattgtaggcattccaaagtatgtgatctctgatggtgtcattttaaagatgtctttatttatttgtattatgtgtgtgtgcccctgagtgtatattgtgtgcacctgtatgtgcaggtgcctgcagagaccagaagaaggcaaatctaaccacttgatgtggtttctgggagccaatcctggctcctctacaagaacagcaagcactcataagtactgagccatctctccagccccctcttattttttaaacacttaaatccaactcactgcctaaatatttttgcaccagtgaggttaagtagatctagctgcagacggtcagtgacatccccaagtgagtccacaagaggaatcgtgaaacaggatttgggtggtgtatcctggaatggcagttctcagtgtacacacacacacacacacacacacacacacacttgaagggtctttttccttgacctcccgtgcagaaatagaggcagaatttaccaccaccttgttagtgagagctatgttgacctgcctgtctgcttgacttaacctctcctggcagaagcagtttgagttagtgctacatgtaactgatgcatttgttctcccacagataatcgcttaccagccgtacgggaagtctgtagattggtgggcgtacggtgtgctgctgtacgagatgctagccgggcaggtaatatttcactgcatgtttgtatgtgtgtgtttgctgctgtcgcatgtggtgtgaccttcaccctacaaaaggcaaaggtggcaacaggacaacacagggtgacaaatgagcagataatcatctcctgatcataaaaacttcaagcgggaggtggcagtcaggactgtggatgtggcgaccacccggttgtgcaagggtgcaaattgatgactgcaatgaccgccttgagttcttcagacctgggactgggatatagttccttacaatttggtcagcaaagatcatcccagccactgattatgatttatttgtgaaaggaggaagaaggctgtgaaactcacagttagaccctccctttccatctatcttgctgttggcaatgcaggattattcccaccaaactccagcaaggctgaactcccattagggaaattaggtttcatgtcatttgagacttttatcagagaactgagtggcagtgcctagcacagcactgcccccatgcaatggcttctacacctgagccactactttgataaacaacctccagatctcagtggctgcctcgtgcactccatgcagttctctgcagcccagccgaggtagcagacagggagagtgagcccagtctgaagtcatgtgagaattcaaggtcagcgccctcctgtcctttctctttgccatggctgaggaccttagagttgtccactgacgcctcatttcaaccaatgatggagagagagagcaagggaacagtcatgggggatattttagaagcaggcctaagtggtggccacttgactcccctcgactacagagagggccagggggctgagctgtctgagagcttggctggaggcagtgggtttggtgaaaacttgaggcatctctgactttatgcctgttttgtcactttcctgttactgtgacaagacgtcatgaccaaagcaacttataacagaaagcgtttaattttggattcacagttccagagggttagagtccatgaccatcatggtagagagcatgacagcaggcaggcatggtgctggagaaggacctgagagctcacatcattgcctacaagtaagagacagagagagctaacagagaatgaaaaggcaacccccagggtcacccatactccctcaaggccacacctcctcctgcaaggccacgtctcccaatccttcccaaacagttctgccaactggagaccaagtattcaaacataggagcctatgggagggactctttcattcagatcaccacaaaacccaacttctttttttgtaaattcctagaactctgaggtagtgctggggaccttgaccttagaggcaagaaccttaataatcaaaaaaggacaacatacccattctggggacaaactgcctaccattctgagatggtacattcattggccgtaatttatttgcgcactgaatgcttcctacttacagtgaggataaaacagacagaaatcttcacctccacagagctcacagctcagagaaggagggagaaaacagactaattagaagatgaaaatatatgttaggcataaactaaaaggaaagagcatgtggccttggttaagaagttgaagggaagccaccagcacagctagagcatagtaaaatagagaaagccaggggtctctggccatgaacacagttctctggtgaacacagttgtcacctcaagactatctagtagatactaaaaatttgtttagctatagaaaaatgcaaacccttgcctacattcagtcactattcctctatgctgttaagatttgagtgggatggaaagagcggtttgtttgtttgtttgtttgtttgtttgttcaggtccactccccccccccatctgagaattcctcttaggtgtaatgccttagtgcatgagcacagaaaatcaggttatacaggctcactgtctggggcacacagatgggagagcacgggttgcctatgctagaagccaatttcccctcctgaaaatttcgacaacaaaatttgactgtgaactgccagacacctgggagccctgcagaccacgtaggcaatatgcagtctggacccctgagtgtcgaactctcagggccagaaaacaagccctgccctcattgtgcatctcttttgtatctgccagccagagaaaccagctgaccagagacacagcctggctttcctgagggttgatccatgccttggctccttattggctgacagaagactagagtttcagaacagcagtgaagtcctatcttcctcctctccttcctcccctccttcctccctcttttcttccttcccacctacccgccagccttcttccccaggatttcccaggctgtatcccctagtgaggagcccaggaagtaagtctcccttgggccttgtggtgacaaaaggctgaaagcagggtaaagtgcagctcgttttggctcacagttcaaagggtacactcagcagcagacacccgagacagctgcgcacattgtatcccaatcaggaagccgagagagatgaatgccattgcctatccagctctcgggtcagcctggacctcagcccatggagtgtcgacacccatagtagttaaccaagtctagaactcagcacaggcatgcccagaattttgtttccatggtgattctgaatcttatcaagttgacaggataaaccattacaggccttgtatgcagagcctagatagatgaaccatcacaggtcttgtaatcagatcccgaggaggtatccaggccttccaagggtccctctcacccctgttcccatgcctggagctttcatacaccttccatcctatttcccctgctgcttctcagccacgtagcatgccttgcatgtatccctcatagtctctattttgaaaagggtgatagtcctcaaaaatggcacctgcatgctggtgccttgctgggcacagcccacaacctctgttccatacagcgctacccagctccctacaaagagaaaactcagttccaatcagaggctggcagagtgaagtgaatgcctggtgtgtctacgacttggctgcaggtgtcacccaaatacccacagcccctcacagtcacagggactcagtgacaagagtggatcggcaccaggactgaggaggaagactgatcgcaggcttgtctgaggggtcaggcactgcatttgtcttccttaactatagctaacggtgaggggggaaaggtggctggttgcaattttatgtgcctttcggcttatcagctgtcagcagccaaatggagccattaagtctgaattgcctgagtctatatccagtttctgaatggcctgacaaacataattgcttgggcaggggcattaatagcgcctgtgtggccctctgatgagctcattgcggctcccagtgttcacagtatttgtcataaggggactggccctctcatctccatcctttcctttctacagatgtgtatctgtacggggcgcttcatctcagtaattggagcttcagcccgaatggtccatgtgtgtccctctcccttcctcctaggtcctcagcaatctgcaaagcaacatggcagggcccttccctactgcctgttaggaagcgagtcaggaagcattttgtaccatgggagccatcaccccatttgcctgatgaaagctgagagctctccagtggggcgtggggctcaacacgttcagaaaattttctttacacaaacccgagactcattaatggggagctgagctcagaacactgtgtccagatttgcagacacttagaaatagctgtaggaagagagatagcaggggagagaggcactctgaaatggtcacgtactaaggacccgggcagcaggtctccccacattgtggtagctggcattactagaaaggaagatggatgtaattctaacctggcaccactgacctgccttcagcaccaaggcctgcgagtgggtaattatctgtaaagaggcccccagggtgagctggagtgttattagacgcgttctcacgaccggccaggaagaacaccacagaccagaatcttctgcggcaaagctttattcttacatcttcaggaaaagagagcaagaagcaagagagagagaaaagcaagagagagagaaaacgaaaaccccgtccctcttaaggagcattctccttcgcctcggacgtgtcactccttgattggctgcagcccatcggccgagttgacgtcacggggaaggcagagcacaagtagtcataagatacccttggcgcatgcgcagattatttgtttaccacttagaacacaggatgtcagcgccatcttgtaacggcgaatgtgggggcggctcccaacatctccccctttttcttttaataagagcaaataggccacccatattaatgagagtggagatagaggtcaaatccccagtgtgtaggtaaaggagccatgtacaggattagctcttaggcttacaggcttttacccagagcaaccctgacctgctcccgtgtcgttttgcctgggggaagggaactaggacactgaaccttcatgaaagatgacatgtctccctagaataggctcatatatgccgcagagcctttccattgcagtgcttagccttgcaactctctcgggctgctgaagcacactcactctaccccgtgcaatgagtctagcctcatgggatataagagctgagtggccagcgacctattgcctaagcatagataaccatatatcagggggagctccatgttctagtcctgcaagcgcctgggcaataaccaccttgtctctcctagtttaggccttaagcttacagaccaatcaaagaagcaacactaatccacagcaaagtgtatctccaaataatattaatcccacccattttttttttttttaaagaaagaaaatgctgaggagatccaattgggtaatcctttggtcagggacaggtccaagcgcgtggagttgacctgaatgatggcaagcctcgaagggtctgttcaaattcagccatccaattctgtaacatatactgaaaaagactttttgacaaattagctgccctagtaaatttaacatactgaatggaaataacacacaatcccggaaacttttgttcacatccctgctgagttatttgtcataatacacctagttgtatctggacaagatctatgagttgattaaccagcatgagacctctctgtatcttgacattagctgaggcctgttcatctatgactgtagtcactgaggctgacaaagtgttaatggtgtcagtcatctggacctgtccagacagagccaaggctgtctgaattaaggccaaacccagttcctagttagtggtaaaaaagcaggagaatacttgagcattatacatcaccgtcattgggagtggaaatgtcgacattatcccccaacgctgctctctctttattattgacgccctggacatcaccaagacgagggacattagtattcccttggtcagtctggatttttcgggtgagtctttctggtaaccaaaatgggttgtcttcattctgtgggaaaacacagatagctcccctggatcttatcaagataggatccgggccataccatttattatcaaggacatttttccatttaaccatctcattgggcctatctggctctgaacaatgacgttcagccgcagtatggccatgagcatcaatatttaaaaaattgagtgtaaagagtgccaaagacaccgacactcttggtgctcggggtacagtctcctcaaaagttcccctcttctgttttataagataggctttgagggtgcgatgcgcacgctcaacaataccctgtccttgagggttgtatggaagtccagtcaggtgggttacgtccatctgacggcagaactgctgaaatttttgagacgtataagctggtccattatcagtcttaaggagtctgggtttcccccaagcactccatgcctcaagacaatgttgaatcacatgtgaggctttttctccagttaacggagaagcaaacatgatgccagaacatgtgtcaatggacacatggagatattgaagttttccaaaggaagaaacatgtgtaacatccatttgccagacctgtagaggtcgaataccgcgtgggttaattcccacatgaggaactggcaagaactcacagcagctttgacattgagtaacaatgtcacgggcttcttttctggtcaaggagaaacgactgcgtaatgtttcagccgtcacatgaaaattgttatgaaaatttcttgcagcctctaccggggatgatagggcagcagccaccactttagtggccttatctgccaaatcatttcccagagccatggggccaggtaggcctgaatgggctctaacatgagtaatataaacaggagatcttctagataacaaaactaattgtatctgctgaaaaatattggcaactctactggaaggcttaatcactccagccacttctaaaagatttactgcatttaccacataacaggaatctgacacaatattaaggggttctaaaaaggtttttaaaacttctaagaccactaaacattctaccacttgaggtgaattttcattatattgtttggataccactttaccattagccacataggcacctatgccagtttttgatccatcagtatataccacaatcccatttttaagtgggtttcttactgttatttgtggaaacacaacagattgattttgggcaaactgtaagattggatgttttggataatggttatctatttttcctgaaaaggaggtaactaaaactgcccaatcattagatgcggctgccaaggtttgaacctgtgcagcggtataaggtacaattaaaagatatggactttgcccaaagtgggtgattgctgcttttaggcctttaagggcaagctgtgcaattgcatcaggataccaatctattattttagctggggatacgtttggatggatccacaacaatggcccattctgccacaaaactgcagttggcaattgtgctgtcttaaagacacacaaactgaaaggctgcgaatcctcaatacgttgtaattgtgcattctgtaaggctttttccactttttgtaaggcctggttagcagctagagtaagagtcctaggggaggagatatgaggatctccttctaaaatactaaacaaaggccttaattcagcagaaggaatctttaaaaagnnnnnnnnnnnnnnnnnnnnnnnnnnnnnnnnnnnnnnnnnnnnnnnnnnnnnnnnnnnnnnnnnnnnnnnnnnnnnnnnnnnnnnnnnnnnnnnnnnnnnnnnnnnnnnnnnnnnnnnnnnnnnnnnnnnnnnnnnnnnnnnnnnnnnnnnnnnnnnnnnnnnnnnnnnnnnnnnnnnnnnnnnnnnnnnnnnnnnnnnnnnnnnnnnnnnnnnnnnnnnnnnnnnnnnnnnnnnnnnnnnnnnnnnnnnnnnnnnnnnnnnnnnnnnnnnnnnnnnnnnnnnnnnnnnnnnnnnnnnnnnnnnnnnnnnnnnnnnnnnnnnnnnnnnnnnnnnnnnnnnnnnnnnnnnnnnnnnnnnnnnnnnnnnnnnnnnnnnnnnnnnnnnnnnnnnnnnnnnnnnnnnnnnnnnnnnnnnnnnnnnnnnnnnnnnnnnnnnnnnnnnnnnnnnnnnnnnnnnnnnnnnnnnnnnnnnnnnnnnnnnnnnnnnnnnnnnnnnnnnnnnnnnnnnnnnnnnnnnnnnnnnnnnnnnnnnnnnnnnnnnnnnnnnnnnnnnnnnnnnnnnnnnnnnnnnnnnnnnnnnnnnnnnnnnnnnnnnnnnnnnnnnnnnnnnnnnnnnnnnnnnnnnnnnnnnnnnnnnnnnnnnnnnnnnnnnnnnnnnnnnnnnnnnnnnnnnnnnnnnnnnnnnnnnnnnnnnnnnnnnnnnnnnnnnnnnnnnnnnnnnnnnnnnnnnnnnnnnnnnnnnnnnnnnnnnnnnnnnnnnnnnnnnnnnnnnnnnnnnnnnnnnnnnnnnnnnnnnnnnnnnnnnnnnnnnnnnnnnnnnnnnnnnnnnnnnnnnnnnnnnnnnnnnnnnnnnnnnnnnnnnnnnnnnnnnnnnnnnnnnnnnnnnnnnnnnnnnnnnnnnnnnnnnnnnnnnnnnnnnnnnnnnnnnnnnnnnnnnnnnnnnnnnnnnnnnnnnnnnnnnnnnnnnnnnnnnnnnnnnnnnnnnnnnnnnnnnnnnnnnnnnnnnnnnnnnnnnnnnnnnnnnnnnnnnnnnnnnnnnnnnnnnnnnnnnnnnnnnnnnnnnnnnnnnnnnnnnnnnnnnnnnnnnnnnnnnnnnnnnnnnnnnnnnnnnnnnnnnnnnnnnnnnnnnnnnnnnnnnnnnnnnnnnnnnnnnnnnnnnnnnnnnnnnnnnnnnnnnnnnagctgagcctgtttgtgttagctgtgaacaccaccttggccaaagctcaaatcccttctgggttcctcattaggggtgatgagatgatgtgtggatgtctaacaaaaggcatggagaggatgcctgctatggggccaaagagaaggtgtgttgggcagcaggccaggcaccactgtcactcttggctggcctagccctcccccagcaaggccgtctgcagctgcactctcccgatgacctgccctgtagatgccaggtttcatctttacaccatggcaggccctgcccgtccttccctgactaattcatggctagactcattccttctcctcacccacgtgcacgccagtgccacatcacaggtgcttttcacagccaggcgtttgtaaccagcgaagagactctttgtttacacttaaagacaagagagacagaaagaaatgaagagtcacaagtcaacaaaactacattctcccatgcccggcccaaagggaaggctctttacacacttggcatctttccctcagagcatgtggctctcctgccctggccccatacccagttccccttcaaagctctctgccagggaagccccttccatctttacactgaaggttagttataccaaagatgatattcaggaatttctcgtaaatccagtcctcctgggcacatcccattagagagagtgagagaatagtacctcaggggaaaagatgcaatggagaaaccactgtgaagagcaccttggacacagacagttggttccatggtctccttacaacccctcccaagagctttctctgcctcagtaacaactgtaaactcccttctttgggctgcttctgggtactaccaacgaagctctgcactagtcagaaaccttgttataggagctgctgtgtaacggccatccgagtgtgagcatcataggaaccactgtgtaacggccatccgagtgtgagcatcataggaaccactgtgtaacggccatccgagtgtcagcatcataggagccgctgtgtaacggccatccgagtgtgagcatcataggaaccactgtgtaacagccatctgagtgtgagcatcataggaaccgctgtgtaacggccatccgagtgtgagcatcataggagctgctgtgtaacagccatccgattgtgagcatcataggaacctctgtgtaacagccatctgagtgtgagcatcataggaaccactgtgtaatggccatccgagtgtcagcatcatagaaaccactgtgtaacggccatccgagtgtcagcatcataggagctgctgtgtaacggccatccgagtgtgagcatcataggaaccactgtgtaacagccatctgagtgtgagcatcataggaaccactgtgtaacggccatccgagtgtgagcatcataggagctgctgtgtaacagccatccgagtgtgagcatcataggaacctctgtgtaacagccatctgactgtgagcatcataggaaccgctgtgtaacggccatccgagtgtgagcatcataggagctgctgtgtaacagccatccgagtgtgagcatcataggaacctctgtgtaacagccatccgagtgtcagcatcatagaaaccgctgtgtaatggccatccgagtgtgagcatcataggaacctctgtgtaacagccatctgagtgtgagcatcataggaaccactgtgtaacagccatctgactgtgagcatcataggaaccgctgtgtaacggccatccgagtgtgagcatcataggagctgctgtgtaacagccatccgagtgtgagcatcataggaaccttctgtgtaacagccatccgagtgtcagcatcatagaaaccgctgtgtaatggccatccgagtgtgagcatcataggaaccgnnnnnnnnnnnnnnnnnnnnttctgcggcaaagctttattcttacatcttccaggaaaagagagcaagaagcaagagagagagaaaagcaagagagagagaaaacgaaaaccccgtccctcttaaggagcattctccttcgcctcggacgtgtcactccttgattggctgcagcccatcggccgagttgacgtcacggggaaggcagagcacaagtagtcataagatacccttggcgcatgcgcagattatttgtttaccacttagaacacaggatgtcagcgccatcttgtaacggcgaatgtgggggcggctcccaacactggagagtcctagcaagaacataaacacgttcatattctttgctgtgtaatcccacacccggacgctgttcctcagaagtaattcagaggaaaaaagagccagcatgcagagatgtttctactagcatttgctatcaaaacatgtgactcaaagcgactgttaacgcacccaaggacccatgaatccatttgaagagatcttggtggctcttgggccctgaacaggaatactgctggctactgagaaaaatgtgtttgcaacagtcagaaaaatgaagaacacagatagtatcttatttgaaaaataatatatgaaaacctgagaatccatgaaaaaaaaaaaagaatatttgcaaatatgacagggacgctatacccaggaagtatctataatatggctacttaagaactgaacaagagagcctggtggtggtggtacacacctttaagtccaggactcaagacagaggcagaggcaggcagatctctgagttccaggtcagcctggtctccacagcgagttccaggacagccagggcactcagggaaaccctgtcaataaaataaaacaaactaagcaaaataagcaaaatcaaacaaaatccccctcaccattctggctactactagcaagatctgaacaatgacaataccaggtggcctgccagtgtgcatgggggaagtcacatgggacaccacccctagatgaaattataggtgattaaaacttctccccccagagataagcaccctaaatgattacctactccctcatggtcagcccaaaacatagtcacataaccaacggtaaatggnnnnnnnnnnnnnnnnnnnntctcgtaaatccagtcctcctgggcacatcccattagagagagtgagagaatggtacctcaggggaaaagatgcaatggagaaaccactgtgaagagcaccttggacacagacagttggttccatggtctccttacaacccctctcaagagctttctctgcctcagtaacaactgtaaactcccttctttgggctgcttctgggtactaccaacgaagctctgcactagtcagaaacctcgttataggagctgctgtgtaacggccatccgagtgtgagcatcataggaaccactgtgtaatggccatccgagtgtgagcatcataggaaccactgtgtaacggccatccgagtgtcagcatcataggagctgctgtgtaacggccatccgagtgtgagcatcataggaaccactgtgtaacagccatctgagtgtgagcatcataggaaccactgtgtaacggccatccgagtgtgagcatcataggagctgctgtgtaacagccatccgagtgtgagcatcataggaacctctgtgtaacagccatctgactgtgagcatcataggaaccgctgtgtaacggccatccgagtgtgagcatcataggagctgctgtgtaacagccatccgagtgtgagcatcataggaacctctgtgtaacagccatccgagtgtcagcatcatagaaaccgctgtgtaatggccatccgagtgtgagcatcataggaacctctgtgtaacagccatctgagtgtgagcatcataggaaccactgtgtaacagccatctgactgtgagcatcataggaaccgctgtgtaacggccatccgagtgtgagcatcataggagctgctgtgtaacagccatccgagtgtgagcatcataggaacctctgtgtaacagccatccgagtgtcagcatcatagaaaccgctgtgtaatggccatccgagtgtgagcatcataggaaccgctgtgtaacggccatccgagtgtgagcatcataggaaccactgtgtaacagccatctgagtgtgagcatcataggaaccactgtgtaacggccatccgagtgtcagcatcatagaaaccgctgtgtaatggccatccgagtgtgagcatcataggaaccactgtgtaacggccatctgagtgtgagcatcataggaaccactgtgtaacagccatctgagtgtgagcatcataggaaccactgtgtaacggccatccgagtgtgagcatcataggagctgctgtgtaacagccatccgagtgtgagcatcataggaaccactgtgtaacggccatctgagtgtgagcatcataggaaccactgtgtaacagccatctgagtgtgagcatcataggaaccgctgtgtaatggccatccaagtgtgagcatcataggaaccgctgtgtaacggccatccgagtgtgagcatcataggaaccactgtgtaacggccatccgagtgtcagcatcataggagccgctgtgtaacggccatccgagtgtgagcatcataggaaccactgtgtaacagccatctgagtgtgagcatcataggaaccgctgtgtaacggccatccgagtgtgagcatcataggagctgctgtgtaacagccatccgagtgtgagcatcataggaacctctgtgtaacagccatctgagtgtgagcatcataggaaccactgtgtaatggccatccgagtgtgaacatcataggaactgctgtgtaacagccatccgagtgtgagcatcataggagctgctgtgtaacggccatccgagtatgagcatctagctgggaaatagagttccatactccatggtatcattactgctctgtctctcagcccactagaagggacaaaggacatatctaaaagctagctcctgtcagttgccaccaagcaggctgcctgtcttgtcggtcaaaagggttcctacacttgagtcaaggcaaaaaaagcatactttgcaccctcacacacacacacacacacacacacacacacacacacacacgccctctaaacacagaaccatctgcaacctgacttgttcataattagatttttagcacataattacaaaattaatggattaattataatttatttgcaaatcactaaacatattactccaaaatattttccctaaagattattttgggtcgcccagggtaagataatgaaaaggacagttttaaaaaatgggaaatgcacaaccagctgcctaattaaagataatctcatcagcctccgtgttcacggagctaaccttgccgcccgcccgcccgcccacccgcccgcctgcggcgtatagggaaacatggtccgtttcttctcacagatctctaagtgccaccatggtaatgtgttattcctcctgttttccccttctttgtctggaacagcctccgtttgatggtgaagatgaagatgaactgtttcagtctataatggagcacaacgtgtcctaccccaaatccttgtccaaggaagccgtctccatctgcaaaggagtgagtacatccggtttcttctcccgtggtcaaccatgagggctggccagggaaatgccctttccatacctgatgttgtctttgagatagggccttgctctttagctcagccagctctgaactccctatgtgtaccccaggctaaccttggacttgtaatctgcttccttaaagctctcaagggctgagatcacaggcacgtaccactatgcccagcttcctctccagccttctaagaaaggcactagaactatcacaacgtatgcatgttactgcaaagcttggtgacatgtgaggcatagaggaacagaacagactcacattccagtactgcccaaacatcttgacccatgctcttactctgtgcacttcagttcccagcccatctcatagcgttgcagtggggctgggacggcaccagaattaatggtagctcagtcaatgacgtgatagccatgtaagcatgaagacccgagttcagtcctcggaacccacataaaacagccaggcatgctggcatatgctgttgaagtaaaggcaggcagaccctgaggctcactggccagccagcatagctccaatctgttccaaggaggagcaacacccaaggttggcctctacacacatgcagacattcatacaccctctgtcttccacacatacatatacctacagtcacacaaataaagaaataatcacaggtccttggagaatgctaatcctcatatctgtgacagattatcctttctctcttaaaatatacatattaaaaataggtatagacatatcagttagttttcacagaatggaggcatgcacataaactgtaccatggtcaaagacagaaccctagataccccctcctctcccttgatagttgctatcgcctaccaccccaaaataatcagtattgactacacagatgaatcttgcctgtcttggcctttgcacaggtgaggttcatcagcatatgccccaggtctgactctttacccagcatggcatagtcaatgtggccacatcgctgtgtatggccacatttccttcttccatgtttgctgtgtggacactgaacagtccttccctgtatcccactcagtgcggagggcacttgcattgtttccgccttggctggaggctgttataaatagaactgttttaaaccttctgggtccttagccagctctcctttcagggaaatgctagcaacttaattgatctttagtggccatgattaaagttgcaaagttcctttttaaatgttatcaaaagagagtataccacacttggtgttgcctatttagtgtttgaaggtcaaggctaagctgcctgtggcacctgaggagctcctgcggtggaagagcccagagttggcactgccctccgagtcccacatcagataccttgaaaggaaccacttgctatctttgctgcaatgtgtacatttcaaccccatgagcctgatgatattttgatccaggcaataaagaggaatgtgatgcttgccacatatagcatccgtgtgatgcagcatacagcattcgtgtgatgtaggcctgcagtactctcagcacacatgatttcccatgacctcatgttaaatcaggcattcatataaataacatgaacgtctcttcttccctccctccctccttccccttccagttttcccccctccccctttggcaatgctaaggattgaacctagggctttataccttgtaaaggtgactccttactactgtgacatgtcctcagtccccctgcccacccccatctacatacaaggatgccaggttcaaaaagcacttgatacatgcagatgcctgtttgaatttccctcccattcgatcatcggttccaactgcttccttactgtgaaaatcgctgcacagaggccacactcaccaccccacatgtgtgtttcttggtggacttccagagcctcctcgggcggcaccgccatctactcggaggcagagctggccgggaaaggttctgccactcatctgtgtctttgtctgcttctctctctagcttatgaccaaacaccctgccaagcggctgggctgcgggcccgagggagagagggatgtcagagagcatgccttcttcaggaggatcgactgggagaaactggagaacagggagatccaaccaccattcaagcccaaagtggtgagtctaggaaggcagaccagtatcctgagctctgtgaccctgaccctggacacggctgccccttccctttctctgggcggtaggaggctggtgaccctagccttggcagaaagtaaggataatggctgctcagacaccagctccagacggtgcacaatcctagaatctgatagccaaagtgaagacagaaagacagacacttaccctccaaaggatggccacagaatacacgggccattagccagcagcctgcactgaacaccaggatactttaccctgcagagatttccttgcctggtccttgacaggactcaggtcttaagtctatctcctaaatccgcctactctcccagcctcccctcatcctgccccactatggggccctggagcacacctaaatctctacagtcccacagggagaatctgaacacagtgcccacagtggcctctacatccacagtacagagtgggtggccacctccagtgccagcactgctggctttattcagcttctaccgtgttattcccatcccattatatgacagccctgttcctggcacttttcaaacatttagtttacataattctgccaacagcctggtgagacagaagggcatgagtgtcccagctttgcattgagaaaaccaaaacacatagaggctgactagctcactagaagacatagctggcagacgcgggacggatgggttgggtcctttgcactaggctgttggtgacagccctgccgcttcttctggtagtgaatggcagccagtatgccccttctcaaggtttctgtccccagaactaaactaaactgagtatctttaagataccaactcttcgtacacccagcctgccattccatgcatctgcccagagagccaccccttctaagtctcaggcctcctgagcctctgtcctggtactctccagatactactgtaaggcaagctgccatggtccatggccagtgtcagacgtttccactctgccacctgatcagccccgatctgtctctaaccaacctgcctgagcaggccaaggggaccctgcggtgccagagctgcagtgcaggagctgcgtatccatcctcggacgtgcccgtgtgtcctctgtgccaagaataacactggcagtggcgagcccgctggactttattctcctcggacatttttagcacagacagaagacaaactaaaattaatcaggtcaattgacacccctctccccccccaccccccagccaaaaagaatgcagagacagaagccaggtcgcaggggagacacagttcagggaggagtgagaagcaagcagggcctgatgctttgttttgtcccaaggcaaaagaggtcaaacagagagagacagtgagggagttctcggttacatgcagggcagcaaagagcctcccttgagctcagtcccccatcccacccccaggccacaggcacagagcagtcacctcctaatctcaggtgaggagcatcatgcaagggtccctagggcgtcactctgtctgtgtggcacggtgctggtatggaaatagcacaccaagaagagttcaagggttgaaaggtcatttagagagggaagcagcttagtccatgccaccatctggtcagcacaggtagcggggagaaaggactgcagacagaaacggctctgggatgtggtttcccagcttcctcagtgaaacatacctctctggtccacggctcaatggaaactcagaggagtcttcagggggaaaaaaaagcaacaggtagttagttcaaagaggagtgagcaacacaggcccctgttataagcatccagacaatgtggctgccggaacctctgactttgtccatgtccccacggtgagcctggctttgagagcccatggtacccccacctctgagcagccctagcaggcctgcctagcaaccttatcttcggggcttcctggtgggtttctaacaagcactgaagacccaattttcctgagatctgcaggattaaaggccattagctgttctcccatttgtactgccttggctcccatggaattaagcctttacttattgtcaattaccagctgtggactgccagcgctcacagtattggctgcttctaggcatctcatctgtgcttgtagattcaggagtctttcatccttggttttgtttggtttttggttttttacctacctcttaactcttaatcctctgaagaaaaatgattccagaatcattggtcctgtgctaggaggagagactttacacagcagggcagatctataggaaccaaggttccctgggtatacagcctgttcgttgtctttgtttgatcagttaagtagcaacttaggtgacactaaagttagcctttagaccaaagtgccatgcaaaacgtgaggtatcacagcaaaagacctcttgtttgtttgtttgtttgtttgtttggttggttggttggttggttggtttggttttttttgagacagggtttctctgtgtagccctggctgtcctggaactcactctgtacaccaggctggccttgaactcagaaatctgcctgcctctgcctcctgagtgctgggattaaaggtgtgtgccacctctgcccagctgtttgtttgtttgtttgtttttagcaaaagaccttttataatgcactccatcagcaagttctatccaggactctccgtctcccactagcattaatgtcaagacctccgatgctcccgtggctggccttctgtgggcggccactcatacaagagcaatgaacaagagtggtgggcatcagatataaggacactactttcctgtggtgtcagcagtgagggaagtatttggcctacagtgaccagtgacgagaagacccgattctcaggagagccatgcctacctcccagaggctaccacgaaccaccgtaaaaacaaagttagccctagggtaagctttcctgtgctaacttgttttaaaatcaagataaaagcaggccggtgagctttcccaacccgtaagtgaagctattagataaatgtctcttatctttatgagaaaaaccaccatccaggccagtcccagcgagcttctgggccatttctcctggtgtgttagtcatgcaatgaagtagcctcctctccatttccccacctaaagtcagtagtagtgtatccagataccacaagcatacagttaattgatttttttcttctgtttttgagttctgttcattggcacacacacaaaaagcacaatcactcctttccagacaagccagaaatagccactgttctggatgggatattagagatattgtgtgttaatctgcaaagtcagcaccaagagctaaacactcctgaaaccacaggtaggcggagcattttcaaaatgggccaatttctcagagacagcctttcttgagaaatgactgtagttacttcatcaaaaggaggtaggaaaaactagaataactttcactggagcattgccatccccatagcaagagccaaagacagtgagaccagcaggcataggcataggtagcacagcaaggatcgggcacaaacacgggttctttcccccaccccaccgccataaaggaaggcagcaatagggatgctctcaggatggtggccgcctttgaatgacatcattagcttatttagagaatatggtgatggtttggggttggcagttattttaaaaattattccaaaagaatttctctgacttgtgaaagagttggggatctgggcatggtggcagcactccgtgatgccaatactcgggaggaagacactctgaactatatagtgagatcctgttgtgaaaggccaaaggccaggagtgtagctcagaggtacagcgctagaccggcatgcatagggccctgggttcaatcccagcactgcaaggaaaagggaggggcagggagataatataaagaatgtctacattacatagatcccctagatgttaatgtttcccaggcttgctttgtcttctttttgatttgttctctgaactcatactcacaaacatgcatgcacacacatgcatacacacacatacacacatgtgtgcacacatatacacacatgcacacacatatacatatacatatgcataacacacttacatacgcgcgcgcgcacacacacacacacatgctttcctataccacttgagattaagttgctggtgtcttgcttccttaaacataaataattctgtgcatattttctaaacttgaagacatcttatggcatggtgttcttttaataaggagtctgcaaagttacttgtagggagcagtagctacccaggtgaaggaggctgtctgtagagactgtctaacggagagaatgcctctagcatctaatcagtcctcttgagtggcaggcagattcattttccccgtcttcccattgagccagaaacagggatgctaattaaatctgagattctcgagactcaaggagctttgctgacaacttaaaaacacaaaccatcctcggggacggaagaaatcacatcatgatgtattaggttttgatttaagcctttaaatcctctccatctctgaatggtgaattagaagcaaacagttcctattctttaataaccattcccccaaatctttttctgcttattaaaatgaaacattttaaataataataaatataaataaattgtaagccttggagcttctgtggttaacgacattgtgtatacagacccaatctgactcaagttgatgtgttcactttgtccaaatgtcaagacctaacaatgatggtatggtcattgtactactgctgaaaagagaattttaaatcctctggctctgaccattagtacaaagaaaggctaaatggagtgcacgtttttatcccatagaaaataacacttggaaaggttgaaccttctccctcatacatgcttgggcttttatactttatacattcaggaatgtgctcattgaaaagagccagatgtggtagcacgcagccattctcccagacaagcagatccctggggctcacttaccagtcagcaagcctacatgagaggctccagactggtaagagactgtctgaaaatagcaaggtagacagatgttctgaggcataacagctgagattgtcctctggcctacatgagcaaagactgctcattcacctgcatgtatacaagtgtacctgtttgcgtacacacacataccacatgcacatgcacacacacacacacacatgcacataaacatacaagtgcactcactttcttgtttgttttgtttgatagtgtttctctatgtagccctggcttatgctggaactcactatatagaccaggctagccttccttgaactcagagatnnnnnnnnnnnnnnnnnnnnaaatgtcaagacctaacaatgatggtatggtcattgtactactgctgaaaagagaattttaaatcctctggctctgaccattagtacaaagaaaggctaaatggagtgcacgtttttatcccatagaaaataacacttggaaaggttgaaccttctccctcatacatgcttgggcttttatactttatacattcaggaatgtgctcattgaaaagagccagatgtggtagcacgcagccattctcccagacaagcagattgtcctctggcctacatgaacacagactgctcattcacctgcatgtatacaagtgtacctgtttgcgtacacacacataccacatgcacatgcacacacacacacatgcacataaacatacaagtgcactcactttcttgtttgttttgtttgatagtgtttctctatgtagccctggcttatctggaactcactatatagaccaggctagcctccttgaactcagagatctatctgcctctgcctcccgagtgctaggataaaaggaatgtgctatcatgcttgactaagaatgcactcgttcatgtggatttacatcctgtatctatcaacaaactcatggataaaattagattccttccaaacagcatttccccttcctgagataatgttctaaggcaataggcaagctgagtgtgtctaatggtgtccatgaaaccaaagcccttctctagtccttcatcccagggaatgttggccagaagtagagaaagtctcggtatcattcaggcagttattaccattaaaatactatccatttacagccaaaccatcagccaagtggtaagaatagaaaaggaaagatggcctccccccaaccctaacttctagtcccaaaattcatgaccttttctgtgaccttccagaatgtgacatgcatgtgtaagcccgtacataaggagacagtatggcattttgcatcttgcatctttcacttagcaatatactgcagaggttcgtgggttcacggcattctccatacagccgttcctgattctcgacatctccaattcctctcctctgtccgttcttattctccagactttctgtaccaaaatgcactggcttcagtgggcatccaggccttcggtgagcagaaccttgagtgactaagcaaactaacctcacttttcaccattaaccgtgtgcagctgcttgccctcatcgtgcatcaagaccttccctgagcatgctgaccttcatggaaagggcagacaagtagccagaggccccaccccaagggcttcttccacacagttgacctggcctcccaggaagaataaggcagattaccccagcctgtgtctgccactggccatttaacccacacaaagatacacagggaactgtgcagagaataggtggtattctcataaatgttcagactgtacaacacagtgctatagtcttcaatataggtaagcattctcccaatgccgaggacagcctgccatatctagcaactgtaagaggccctcccaggacccctacattttctttttatttctgtgctttcgcagctaacctctatgcttcatttgttctgcactctggctatccgtttgggatttgtgtgattttgcttcccagtggtcatcgttctgtaaccactcatgtttccatgccagtgaccacggagctgtatctaacactcctgggacaccatagagtgtagacccacacatgtaccgctgtgcacagtgcctctaaggagtaagactcacaggcaagaagccatgccccgcacgcagcacagctcagtctcctccctccactctgtcatggaacaaaagggtctggaaggctgcttgccatgcaggatgtgggcacagaactttgcaacccagatcccatctagggtctacatcatgctatgctctgcaacatctttactatgtgtgattcctcctgagttcactttactgattggttaatttactaaatgggtgatatcctggttcctcttctgtcactgtgataaaataccccgacagaagcaacctaagggagaaggggttcgtttaactcactgtccattatttttggcaaatcaaggtggcaaaaacttggactagctggtcatatccaggatgaagagaagagaaagagtgcatgcctgttcatactcagcttgtttttctcgctcttacatagttcaggatgcctggcttagggaatggtgtcaccctcagtagacagagcttcctcagtgtaatcaagataatccctcatagacttatccacaggccaacctgacctagataatctctcattgagactgccttcccaggtggtactagatcatgtctagctgatgattaatgattaaaactaataatttgggtagagatatcaaaaatgacaaagattttaattccttaatgaagagataagagagaaggcagattgctaatagcatttattcattcttcaaatatcatctatttgcatgcagggctattggttcatgtttatatcttctctctgtataacgtctcatcatttagaaagacctcacacatgctaggtcctttagctctcaccagagccttggaaggtgggtggtcacatccccattttacctttaaagggacatgcaatgaaattcctaaagctacacctggacctcttgatctctggcctggtccttcactctgctgtccctcctcaagtgtcagtactgagcatcagacacaagctgttcccaaggagaccaagggacctgcctgggttcacacaccagctccccatttctcttctgagtttgtcctgggtcacatttctgacagaagtttccactagtgaaagttgttgggggtctttggaggtgaatatcatgtctattcattccagaggcattgttcataagattatttagctgctttgaaggtctagtagactatatctcagaggtcacaaacaacccagatttgcctgttgttctagctgctattggagactgtcctttaaatggctataataattttgggaaaacatctgcagccaagccagcttcctatgccactcattaacttgctgatccacagatgccacttgggtgccccctcccatctcttattccctacactgctccaaggtggcagctctctacccatcaaattgatgatctcaaggctgggtcacaggcagtgaacaatagattcttaaatatattatcttctgcacaaccatccaaagaaatctgattgctataatccttatctggttttgctggtatcatttaagatctctacataacatctttaaatagtagttcaagatcttctccagttttcctaaaagagattgtctgtttctgggcctggttttgcttagaagcatagaaagttcatttttgagatactttttctcagtgtatgattaatttatattttttacaatatgagatttatgattaaaatatttctgctgccttttgggatatcattcactctcatatgacaacagtcggaataagacaacttctgagtcttgtatttcatcttcagactcaacccccagttttacaaaggctgttatccccatttcttgctaagttatagtcacacccctcattgtttttgtttgaggggggttggtttgggttggttggttttgatttttttttttttgtctcatggttgatatattttaatttcagtgatttaatttttattctctgaactcagcctgctctttcctctggtctctttacctaaattgagtcagtttaagaaaagccttcatttgccataatatggtttctctccctctctcgttctctttgagcaatggaaaattccaaggaaagttggggtgagagaagagaaaggcatctgtggtggggaacaattctgagactaacagacacatggcctttcaatgtgaccacagagcagggatttaatttactggtgatccatgttttccccttagctacatagtcttcagtactgacaccatgaggattcaaagagtttttccatcccattacaatttttggctttataagcactagctgccttagcaataacttttcttggaatactagctgccttagcaataactcttcttggaataatagctgtagaatttgatgtgctcttcccaccccacctccctcagtgttcacgtggatcctctttgtaggttttaaggactctttggcagtagatcccatagtactaagaaacttctcactgcaaactaatttgtgagcatcagagagacagtattcaaataaaggaccacacaacataaacttttcaaagaacaaatccataaatgcaatgctagacaggcaggcaaatagaacatttaccttggctagccttgctctgccttgtagagacacatattctctctctctctctctccctctctctctctctctccctctccctctctctctctctctctctccttagaatctccttcttgctcttctttgcattgtcagtaccagaaagttgacaaatgatgtcttcttaagtgttctcatgcccaccttctaaaagcatccacagtaaatgcactgcacttgagttcttccaggtagttgctacacatccatcaccaaaagggagtgttcctcaaagccaaccctatagggctatataacattgcttacatcatttttctttggccttctacaaattctccatgctctactcccacacatggttgcttttgcctaattttcatgcttggccccttcacaccaaccacaggacctctcattacagtctagatatatggagtctagtgttttccaacagatgcactattgatattttgagccaataaatatttaagggaatggggaaatcattcatcttaggatatttagcagtatccccctctaaccactagttgacaatggcatcccttgtccaagttatggcaattttatgaaaatggatttcctggaggaaaacttttacctggttgaaaatcaagtcttaccaaagagacaactttttctttagatgtttatatcattgcagtagagttgactgtattatcttaatggaaaccagcttctgttgttcatgtgatttatgaatcaaaaatatagactcctgattatttcctgggaagaaacagcatttccttacttgcttcctacagagcccttttcagtggtatcctctgcatgtggctctgcctctgctgacctttgctttgaagtgctttggattcttgcaaagaaaaacatcatgggaatatacagtttgaaagccaaagttttgtggctccacatagaggagccagactaaaatgtagagggtgcttcataacctgtatggactccacagagtgacttgaggacactctgttccccacaacataacaatatagaagcctaccctaaccacgtatgcaccacacacacacccagagccaccccatcactaaagtgtaaaatgtccttgagttcagagtacagtggctatttattaaatgaaaatgatattgggaaaggacactgttgattttgaagaccttactttgaagttagcatatgttttctatctccacagacactgagaagtgtgttgtatttactgcagggaaaatggaaaattataatgaaatgggtttctctagaaaacccattggggaagtagatgagaaaatacaacccatgagcatgaaagatcttattttaaagaaataaataatgtgtgttgaactctgaccaagcgcacattaacctttgtagtgtcatgaggagggagatacagttcctttgtcaactctacagaacctcacaggttacctagaactgtcctctgttagagagccaagaattccgcattaggttaaaatgtatgctgacttaacatgagttcatgttgctccagttatgctaccagaagataaaagagtgacggtttgcagcatgctctgcatcattagtagcatcagtaaaaccccagttcttccttggaagccccagagactttgatgtgccacaacctttctaggtatttggaaaagtggggatattcctttctttccttcctaaaaggagtttaatgttttgcaagggcatcatgcaataagtattgtataactctaaattgtataattgactacgagttgagtaagactcccatgcactactgcataagcagctggctggttagacaatcacagggaagctatgccaaaagcctccatttgcaaagaatgccttggtggatcctaaaggacgataatattcaagacagatcacagactttattgtgcctcctcagggtacctgtgcatatcttctcctgtcttgagactatgctgtgaatgagctccatgttgacctgcctgccacttgaccagctctatccagttatgcataattcttgcttagggcaagaactcatctcctacattgtcactgtacctaccccatactgctttaagattactctgagagctagagtttctaaaacatgccagttacatgtcaaagacacacagcttctgtctgattataaatattactacaaagaaccaaatatgagacagtaaccacaccttgtcaattcatgggtacctacaggcacaatcaatagcatggccttttcaacatggagctatgacagatggccctgtgtgtgcaccattcatgctaatagctctgcttgctcaatgaggtaatattgaagaaagagaggctgtctttttgctatgttgtaaacaacagtgcatttccatttaggattttcattctgagaatattctcagaattatcatatgagaagaattacaatcaagtaactatctgttgtttgctatgcttggcttctaattccagtaggcctgtaaatcctccaagagtcttcctgcccagccaggccaatttccctgtggcacaccctcccaggctctcagtaaacgacttctgtgatttgtatcttctgacttcttctttttttcttttttttcccctacagtgtggcaaaggagcagaaaactttgacaagttcttcacgcgaggacagcctgtcttaacaccaccagatcagctggtcattgctaacatagaccaatctgattttgaagggttctcgtatgtcaacccccagtttgtgcacccaatcttgcaaagtgcagtatgaaactcaaaaatgaaagatcaaatgcctccccagcccccagcatccccagcagtgggaaatgatccttaaccataaaaatttaaggctatggctttgtattttgttccacacagaggcctggaaattctagggacattagtcaatacattatcaacttttttcctcaccccccaaccaaaagcattatcttagtggatgatgacataaagtacagagtatagtttaattatgtagaagtcatgtccggctacaagttgattcttcctaaaaatcaaagagacttggaccctatttttttggtacgatttgatatattctccatactttccatttcttggattttcagtatcagtatcaaccagagatagtaaagtgaacccaccctaactcaaggactcaaggaaacacttccacccaagatgtctttggaacaaaagaacaggaagtccaaagagaaagcaaagagaggttgggggctcatatattcaagaccacatagcttctattctctgtttcaatggaaacagtccctagactcagagagggcaggatgaacctgatcactgttcccagtcatcatagcacaaccatagtgcacagtttaagaatgaaagaaaacttcagacaaatattcactgaatctaccatctgtaatcccctgcttagttgataacaatctctataactcattctttttaagaggccaaatcatctaaggactttgctaaacaagcatatgaaatcatttcagatcaaggataaaccatgtgtacgttcattctaatctctgggagatgactcttcaatccagggtgccatcagtaatcatgccactgttcacgagtgttgttagccaaccccacacacacaatattttgctacctttgtaggtacccttcctaagaagctgaaatgtatgaccccatccccccctttttttttactatttatttaataagctgcagtgtcgtttatggaagtacaatgtatagtaatttagtcaaagtattgactagcctcagtccctctagattgattttcctcctttctctcgccccacatccacttagagatgaaaaagagcatagtttgggttcccattctcagttcctattgaacggcacatgtggaactgtaggatcaagatactttatgctgatatcaactcaaagatgttgtcttgctagaaggattttaatatgttttgcgagtgcatcatgcaatggattttgcatgtttataataaaccttaataacgagttaatctatattattgatataattgtatcaactataaagagtattatgataatttttataagacacaattgtgctatatttgtgacgctcatgtttccagtctgctttaagattaagtgttagctttattcattgctgctgggctctcacccgctactccacacactggcactctatcagatatattaattttttaatgtagatgtaattttaaaaatgaatggctactttacacgtttaactagggttttactatatatgtgtacatatgtatatatatatatatatatatttgattctacctacaaaccccggttttgtttgtggggattattttttgagataagactctgttaacttcttcatgttatcctctgttcaagttcctttgtcaccccttctcttggggacagctgaatatatttaattccagtattcctgatatgttcatatatatgtggcattgttacagcacctaggctgaattgtgtgtgtgtgtgtgtgtgtgtgtgtgtgtgtctgtctgtctgtctgtctgtctgtctggtacttttcagcctatgtctttggggtctctagggatgaaggagtgagaggactcctttctgtgtgtgcatatggacacccaaaaatatgtagtctgtctttctgccccagaataactcactgtgtacttcagaacacacagaatccttgagacaaactttatctccatgcctgtgtagagccatctctgaagctgttgccaacagactctcttcagaggcacatactgtcttaaagctgttcctagaacattcccgtctttgaagagcatgcctttgtccaaatgcctcctaatacaaggtgtttagaagaggcaggcttctgcagcataaaggataagtgaaaatggagttcctaccagtccttagagaaggcacctctatcgaaatcatctcacagctaggctctcctctttgttattctccacctatctgcttgacagtcacataccctgcaacccaccaagagtctttgagatacggagcataggctgttctgaaaatcccttatcagaaggagatatggagttgagagtgggccaaaccagaaaagagcagtttcttctgcaatctttcatgaattctggacttcagacctcaaaaagtggggaagggtgtcatatatggatctcagaagtcaagctcaccatcttggtaacctagccttatcaaaaacactgtactcagtccaactgtaaaggaactggcttatcaatgagccttggaagtgaaagcgttgctcttcccaggtgggacagcaacaggaagctgaacctctcaaagtgggggaaaccacagagaaggagcacagggttcgtagacaatccaccctgaggtgccaagctgcctgactctcatgccagtagcaggcttgggttcttccttaaaccgccagcatccagctccgagtgattcaacttctctagaaaatgtgtgcggtcccttggatggcttgtacgcttagagaatacccaccaacattctcacactggaggagggaaataacagagccacagaccagcaattgcctaaggaacagaacactggagaacaaacttaggagagatgataaaaatttaaggacgtgttcatgatgctgcctattctatacactgctgagggttaaattcagatgaaggctagtactttaaagatctggacagcagagacaacttttgctacaaaactaactcacctggataaccactagcagctgttaggcaggatcaattgatactattctacatccttgtcccacttcacagaccttgtatgaaacagggctacagggaaacatctgccatttgaactgaagcaaccaagcaggaggccagaaccaggagggtgccttgaagggtttaatccccaggggcaggggtgggaactatttagaatgtacctgctctcaggctgtgcctgcattggcagggtctgtggaggagaacctagcacaatccaagtctccacagggacccatcaggccgtgacccagaaaatccattgaaataattttgtattatattcccctggaaggtggccatttcccaggagcagctcttccctgttccaccacaggccggtgggctgctagctctgccttcagtgtggcatctaaagttacctggtgcttgggttgaatggaaagagctggagtatgctgccaggtgcagccccaggagttaatgggaggcttaccccaggcagcagctaattcagaaggcagaagagaagccccaggagctaaactgattgcccttcaccctcctacctctgtggcctagtttgagctagtagccttttctttaatttagtcttttttattagtaatttgagaaactcaggaggcccagagttttccggaagcttggtctgagatggtcacgtgaaagattaccagaggccagtattaaccctcaaatgttgctgctcacaagctccagttcttagcaaataaatcatggtggcttgccaaccccaaaagagccactcatcgatgtatcacaaagaggaggaagcagaagtcaacaccattaaagagcagggtttgagtgcacccaggaagacatggaaggtggtggaaaggttgtgttaatctgcatgggctttccactgggggtcattgtgcaaatggaagttactgttcatcagccttcaaaggtgtggctttttgccagatacaaccttttgttcgttctcagactctcccaactgtaacaagtcctttgcccagagccgagccagccagcagaccctagaagcacttagttccatctttatccctctgataattatggctgctgagactaggtccagaagtcacgaaaacaaccaacaacgacctgccagcttctgctcagcagagaaaaataggaagggtttgtgcagggctttattttctcaaacgcctccacaaggcaacaccacctgacagtcattttctcaccttggtcttatgaaatcatctatttcttgtgtgtacatgtcacgctgtttcctgtttgtttacaaccctagaagggtagggttacctgtccccatgccacggctgagcacatcagtcactctcaggagatgcgtgctgagccagggacctgaaaggatgctgaccatggggggttggggggacaatagcaaggaaggagacaggtcctctggttagcagtgggtccacactaacatgacagagtgttaggaaactggttttaaaattgttttccatgaactgctgttaacaaaatgtgctggacagtcaacacccctgccacatctcactgggccagcgtagcaaatctagaagaagcagatactttctgctgtcagaataatccagaaaatcaggaaagggtgcttgaggcatgcacagacacagtgttctagaaacggtgtctaatgctgtcccagggatgatacagcaatggttaaaaagtgtggttggctcagcattcgtgtggtcaggtgtcagtcaatgaacagaagacacaccaggttgttaaacagccttactgtgaccctcctcagaagcccacaagttccaaagactttttttaacctaaaacaagaaattaacttattaactccaagagagtacctgggtatcctgggctatttgtacttttttatagaggactttaataactcaattcttttcaagtgagtttttaaaataataaaaatttcataaatttccaattccatgcaacttataggaggatttcacccaggttggatagagcacccacgatctgcattcccacagcgggattttcccgtgctagtgaggtctggagtccacattggattggctggcatttcctagcagacactaaagatagctgtgcaaggtttagctatcgctcaactgtggggatgacggctttatagctccccttcctgatacagcccccggaaaggattcttggggatctacaggaccccactcttcactgtaagagtcagagcaggaagggggtgcttcttcaactctggctcaagtcccctctggtccctcagtctctcgcatttgattaaaatggagagatgccctctaaggattctgcccactgggcaattcaagcctcctaccccgagaagagacagcgctgagtgtgcctgggcatctgcgtccatgcccatggatgtgagtagacagaaccctacttttgagaaaacgcctatccagcccactttgtaagaaccccctttttctaaactatgacaaaaggcggctttgcactttctgatcaaacaacactgtcttttgtctcctgcttaacttttaagactattctgtgaccgacgtttgtagatttttttttttgttaatattttgcctggaaaaatgtgactctctccttgggaggtttagtagactaataaaaattatacatgaaggtggttgctattttgaggctaaaggtttttctaagaatcgccctcgtatcctgaccgtgaaggcttttcaggataccttttatagacgatcagatgcattcgagctgtgtttcctacatgatttctgttttgttttatgaaggacacgccatgtttaaatctctcattggaaaaaaaaaaaaaaaaacaccatgcaaaaccccaaattggtttggaggaaggagtgaaggtggaggctgttgcccgaatgggcctttactgatgagccaggggctgatccactgctcgtttggttactgggcaggtgaggtagacatgtaaattactgcctagctttcttggatttgtgtaacctctactctccgtttgcatgatccgctctgttagatgcattcattgtagttcggaagcaagcgtgtatgaataaagatactgatcactgctgagtgagcggctgtcatttgcaccccgtagcagtctcgctcacccatgtttcccacccagcgttctttgaatggcaatggcgttgactccggacacattccgtagaacactttcgtcttttcacccatttcaatggttctctattaaagcctctttaaaaaaaaaaaatctcaaaatagctttggggactggagttaagagcattcattgtatagtcatgaagactggagttttgatcccagcacacacagcaagcagggcgtcccacaacactagcactgatggatctaacaccttctggcttctgagcaagcctgtgtgagaaccccacacacacacacacacacacacaaataaatgaatgagtgactaaatgtattaaaaagaaatcagaatgctgtgcgctgtgccagtgagatggttcagtaggtaaagtcacttgccaccaaaactgaggacccgagttcaaacctcaggactcacatactggaaggagagatagtcaaggatgaccttaaattcttgatcctcctgcctctccaccttcccgtagtgctagactacaggcaaaccaccacgtccagttgtagtgctggggactaacaactgagctatgttgtacccaacccccagaccccagtttctaaaagtcaagggctgatgctggcaatgcctcttgctcacgctctcctgacatcgtcctctgagaggcctctccccttacatgctctctgcattcatatacgcacccactaggtaaatgttttatcctgaactcacgcccagcctcctgaagttcggggtcttgcatctgccatggaaaggcccaggggattgggttctgaggagaagcaaaaacggtgtattcacacacacacaggtcatctgtctaacaacaccctcgtgaagagccagtggccagaagggcctgagacagtccaccaaggtttatccctggtggattcagaggcacaggcaagagtgaatgtggcttgttcacccagtcctacagaggtggcgggaatggtctgaggtcatgaacaatacccttccaggagtatcaggggtcaccagaacggaagctcaagaattctgttcgataatggcctcccagatccccacctctgcccattgacatccagtctgtcagcaggtattgttggggcccctcagtcaggattctcagctggaggctattcctgggatgcctagagttttgatttttgtttttgttttgtttttactgacacagccaggagggattctgctgggtagagggtggggacgctgccaagcttcccacaatatatggggcagtccccacttcaaagctttgccatacccaaaattctagtggtcctgccgttgaggggcccagcctaaaatatttcccaaatctttctacttcgctccaccctcagcactcccttccctgaggtgacccttgatctctcacagctgctcctgcacagcagcccacaggaccagatcaggcaggcccttcctgtttaaagctttccaatagcttcccatcccccaccatccacagcctgccagcataacccactctcaaagatactgggtcaaccgtccggaaggtacgttcagaaatgctgacttgagggctggagaaataattcactcagttaaagtgtgtgtttcataagcgtttaggacctgcattcaatccccagaaccggtgttttcaaaggtgcgcatggcggtgggtatttataatcccagccctggggaggtagagccaggtcctatgaccacccaacctagatgaatagccacacctcgagccaataaaagaccttgtctcagaatacaaggcaggctgctcctgaggaacaacaccggaggctgttctcagcggtcagtgagtacgcgcctgcgcacaaaatgcttactgtgcgcatgtgtataagactctcctatcagaatatgctaagtgaggggcccagcaactaaagagtgtctgcaccgagcagagccccagaagaacatttgtctaatgagtaaatgcataaaaggaccccaggaaggctgtgctacctcacggtactccatggtccttgctctggaggtgttgcggcactaaggaagcaagatagtaggcacacaggcgtggctcgacaatgaaggcaccgggagcggatggatgcctcagaaacccggattctcagcttctggccttcagccttgagtctagaggcagtgtttgcccacgtttacacttgagtggtcagtcaacaccctgaggttctcctcgagcctacagcgtgcttgcttgctctggagggcagtggtgtagtaattagggttcagctaatttagtactatgcacacagcaaaggctctatattttcccaccctccccccatgagtgagcatcgcagggagctgggtactgcttgccagggtgtgtgcaagaaatgctttgagctctaaggaagccaagttggatatcccaggattcttttcttgtaagctagctcaatagacacccattctcgtcgtgaaacgagaaaatggaattcggtgaaatcaaagggctagaggcaggctcaaggactcgacggacacagacaggtgagcatgtcaaagaagcagaagtctgaagcagatgacaagtgcgtggacagttccacacagctgcagacacggggggtgatcctccataaaggtgccagacgcaccttctacagttcctttgtttgcatttatttatagcccacagcgacagccacctcaagtagaacctagtgacctcgttcatcttacataagaacagagggcaggtcagaaaggttgaataccagtacccagagaagcaagctctagatgtctcatgtccactataagtacagggacgtcagctgtgcgtctcctggagaagaaggccaagaacctgtgatctgaggaaggaggggctagaaagaggagatcagtgcaagcagaaactacccaatgggagggagaggaagggctgatgtctagcatctgctatagaatctgggcatgatggcctcattagctcccatggtcctgttcggatagaggtcatgtaaggacttacagaggaggaaaccttgtgatgtctccctatggtagaggccaaggtttacaccttaatgatggaacaatgaaagctcaggtagtaagctgggtacaaactgggtaccatctgtgtacgcttttccagaccttggcctactcagaggttgaagatgcaacaataaatcagagatacaggacctcctaaaggctttttcccttcaccacttcctttcaggctcccaccaccaagggggaagttctcctcgtctgactagatgcccttctgcagctgtttccagaagcttacccacctcccttcaccctctctctcctgatttcatttcccccactttagcactgtctgtgttcagggaggagagagaaaaatagcatccctgttcttagaacccagcaggtactttgcagccgcccacacctgcctgcctcgtgcccagagagacccaggaaaaagaaaacaagcttcaggaatggctggctgggccagagctcagcttccacggcagccttgagttgagacccctcacctaggagtcaagagccaatcagagggaagcatggtgtaatgggtaggggacaggggatgaagcagaacaagatgctcagtgttctacgacaatgagcagcccagggagcagcggtgggacttgtctgcgacagaacactgtagggatgcctttactattctagaacttgacagaaataacaccttgattcctaagaaggaggctgaaaccttatcactgtgaagtcagtactgtcatacttaacaaccaggtagcctggccatcgcattggtcttcatgtctttctgtgctggcaaagaggtcctgtggtaaatgccaatggggctcacaactactaatttttgtacatatggggtgtgtatggtgtgtgtgtgtgtgtgtgtgtgtgtggtatgtgtgtatggtgtggtatatgtgtggtgtggtatgtgtgtatggtgtggtatgtgtgtggtgtggtgtatgtgacatgtgttctatgtgtgatatgtgtgtggtgtgtgtgtgtgtgtgtgtgtgtgtgtgtgtgtgtgtgtatggtgtggtgtgtatgtggtatgtgtggtgtgtatgtggtatgtgtggtgtgtatgtggtatgtgtggtgtgtatgtgggggtgtgtgatgtgtgatatatgtgtggtgtggtgtgtgtgtgtgtgtgtgtgtgctgcacataaggtgtatgtgtacatgcacaagtgtgagagcatgcatagggagaccagagctcaatgccagacatctttcttgattgctctctgccttataagtttatgagtttgttttgaggcagcatctctcactgcctggcaaagagattccgtagtaaatgccaatggagctcacagctattgatttttgtacatatggggtatgtatgctgtgtgtgtgtgtgtgtgtgtgtgtgtgtgtgtgtgtgtgtgatgaagcccatcaattnnnnnnnnnnnnnnnnnnnntgaagcccatcaattcttttcaagttgctggccagggaaccccaggggtcctcctgcttctgcctctctagtgctggggtactggcatgtgtgcccctgtgcccagcctctttatgtgaactctggagatctaaatccggccccttgtgcttgcatggcaagcactgtgaactgtcttgttttatgttgtcaacttgacacaagcaggagttatcacagagaaggagcctctcttgaggaaatgcctccatgagatcaagctgtaaggcatttttttcaattagtgatcaagggaggcccattgtgggtggtgccatccctgggctggattctataagaaagcaagctgagcaagccaggagaagcaagccagtaagtaacatccctccatggcctctgcatcagctcctgcttcctgacctgcttgagttccagtcctaaattcctttggtgataaacagcagtatggaattgtaagccgaataaaccctttcctccccagcttgcttcttggtcactatgttttgtgcaggaatacaaaccctgactaagacacactgtatcaactaagccttctcttcaccatcacattaaacatctaacacatccagaaacacatgaacaaagagagagggaccataaagtctattaaaaattccaatttaggtttcttggaagacaagcaccatccgaagcaaaccaggcagagcccttcttgacttttacaaaattccctggtctttcttggctggattcaatgcacttttttttttacttctattttcagtttttgatggatctacagg

SEQ ID NO: 1478 - DNA, 3797 bp, Mus musculus
gccgcgagtaggaagcgcgagcgccgggcgccgggctgtcagtgagcgtggggccagccagcgagccagagagccggagagagccagagagagcggctcggctcccagctccgagtagcgcagcgcccgcccggctctcccgggccaccgccgccaccaccgcacctcatcagcaccgccacctcggccgccgcccccgcccaccccggccctccccggctgctgctccccggcggaggcaagaggtggttggggggaaccatggctgacgtttacccggccaacgactccacggcgtctcaggacgtggccaaccgcttcgcccgcaaaggggcgctgaggcagaagaacgtgcatgaggtgaaagaccacaaattcatcgcccgcttcttcaagcaacccaccttctgcagccactgcaccgacttcatctgggggtttgggaaacaaggcttccagtgccaagtttgctgttttgtggttcataagaggtgccatgagttcgttacgttctcttgtccgggtgcggataagggacctgacactgacgaccccaggagcaagcacaagttcaaaatccacacatacggaagccctaccttctgtgatcactgtgggtccctgctctatggacttatccaccaagggatgaaatgtgacacctgcgacatgaatgttcacaagcagtgtgtgatcaatgtccctagcctctgcggaatggatcacacagagaagagggggcggatttatctgaaggctgaggtcactgatgaaaagctccacgtcacggtacgagatgcaaaaaatctaatccctatggatccaaatgggctttcggatccttatgtgaagctgaaacttatccctgaccccaagaatgagagcaaacagaaaaccaaaaccatccgctccacactgaatcctcagtggaatgagtccttcacgttcaaattaaaaccttcagacaaagaccggcgactgtctgtagaaatctgggactgggatcggacgactcggaatgacttcatgggatccctttcctttggtgtctcagagctaatgaagatgccggccagtggatggtataaactgctcaaccaagaagagggcgaatattacaatgtgcccattccagaaggagatgaagaaggcaacatggaactcaggcagaagtttgagaaagccaagctaggccctgctggtaacaaagtcatcagcccttcagaagacagaaagcaaccatccaacaacctggacagagtgaaactcacagacttcaacttcctcatggtgctggggaaggggagttttgggaaggtgatgcttgctgacaggaagggaacggaggaactgtacgccatcaagatcctgaagaaggacgtggtgatccaggacgacgacgtggagtgcaccatggtggagaagcgcgtgctggccctgctggacaagccgccatttctgacacagctgcactcctgcttccagacagtggaccggctgtacttcgtcatggaatacgtcaacggcggggacctcatgtaccacattcagcaagtcgggaaatttaaggagccacaagcagtattctacgcagccgagatctccatcggactgttcttccttcataaaagagggatcatttacagggatctgaagctggacaatgtcatgctggactcagaagggcacatcaaaatcgccgacttcgggatgtgcaaggaacacatgatggatggagtcacgaccaggaccttctgtgggactccggactacattgccccagagataatcgcttaccagccgtacgggaagtctgtagattggtgggcgtacggtgtgctgctgtacgagatgctagccgggcagcctccgtttgatggtgaagatgaagatgaactgtttcagtctataatggagcacaacgtgtcctaccccaaatccttgtccaaggaagccgtctccatctgcaaaggacttatgaccaaacaccctgccaagcggctgggctgcgggcccgagggagagagggatgtcagagagcatgccttcttcaggaggatcgactgggagaaactggagaacagggagatccaaccaccattcaagcccaaagtgtgtggcaaaggagcagaaaactttgacaagttcttcacgcgaggacagcctgtcttaacaccaccagatcagctggtcattgctaacatagaccaatctgattttgaagggttctcgtatgtcaacccccagtttgtgcacccaatcttgcaaagtgcagtatgaaactcaaaaatgaaagatcaaatgcctccccagcccccagcatccccagcagtgggaaatgatccttaaccataaaaatttaaggctatggctttgtattttgttccacacagaggcctggaaattctagggacattagtcaatacattatcaacttttttcctcaccccccaaccaaaagcattatcttagtggatgatgacataaagtacagagtatagtttaattatgtagaagtcatgtccggctacaagttgattcttcctaaaaatcaaagagacttggaccctatttttttggtacgatttgatatattctccatactttccatttcttggattttcagtatcagtatcaaccagagatagtaaagtgaacccaccctaactcaaggactcaaggaaacacttccacccaagatgtctttggaacaaaagaacaggaagtccaaagagaaagcaaagagaggttgggggctcatatattcaagaccacatagcttctattctctgtttcaatggaaacagtccctagactcagagagggcaggatgaacctgatcactgttcccagtcatcatagcacaaccatagtgcacagtttaagaatgaaagaaaacttcagacaaatattcactgaatctaccatctgtaatcccctgcttagttgataacaatctctataactcattctttttaagaggccaaatcatctaaggactttgctaaacaagcatatgaaatcatttcagatcaaggataaaccatgtgtacgttcattctaatctctgggagatgactcttcaatccagggtgccatcagtaatcatgccactgttcacgagtgttgttagccaaccccacacacacaatattttgctacctttgtaggtacccttcctaagaagctgaaatgtatgaccccatccccccctttttttttactatttatttaataagctgcagtgtcgtttatggaagtacaatgtatagtaatttagtcaaagtattgactagcctcagtccctctagattgattttcctcctttctctcgccccacatccacttagagatgaaaaagagcatagtttgggttcccattctcagttcctattgaacggcacatgtggaactgtaggatcaagatactttatgctgatatcaactcaaagatgttgtcttgctagaaggattttaatatgttttgcgagtgcatcatgcaatggattttgcatgtttataataaaccttaataacgagttaatctatattattgatataattgtatcaactataaagagtattatgataatttttataagacacaattgtgctatatttgtgacgctcatgtttccagtctgctttaagattaagtgttagctttattcattgctgctgggctctcacccgctactccacacactggcactctatcagatatattaattttttaatgtagatgtaattttaaaaatgaatggctactttacacgtttaactagggttttactata

SEQ ID NO: 1479 - protein, 672 aa, Mus musculus
MADVYPANDSTASQDVANRFARKGALRQKNVHEVKDHKFIARFFKQPTFCSHCTDFIWGFGKQGFQCQVCCFVVHKRCHEFVTFSCPGADKGPDTDDPRSKHKFKIHTYGSPTFCDHCGSLLYGLIHQGMKCDTCDMNVHKQCVINVPSLCGMDHTEKRGRIYLKAEVTDEKLHVTVRDAKNLIPMDPNGLSDPYVKLKLIPDPKNESKQKTKTIRSTLNPQWNESFTFKLKPSDKDRRLSVEIWDWDRTTRNDFMGSLSFGVSELMKMPASGWYKLLNQEEGEYYNVPIPEGDEEGNMELRQKFEKAKLGPAGNKVISPSEDRKQPSNNLDRVKLTDFNFLMVLGKGSFGKVMLADRKGTEELYAIKILKKDVVIQDDDVECTMVEKRVLALLDKPPFLTQLHSCFQTVDRLYFVMEYVNGGDLMYHIQQVGKFKEPQAVFYAAEISIGLFFLHKRGIIYRDLKLDNVMLDSEGHIKIADFGMCKEHMMDGVTTRTFCGTPDYIAPEIIAYQPYGKSVDWWAYGVLLYEMLAGQPPFDGEDEDELFQSIMEHNVSYPKSLSKEAVSICKGLMTKHPAKRLGCGPEGERDVREHAFFRRIDWEKLENREIQPPFKPKVCGKGAENFDKFFTRGQPVLTPPDQLVIANIDQSDFEGFSYVNPQFVHPILQSAV
